(19) United States
(12) Patent Application Publication
(10) Pub. No.: US 2012/0052048 A1
(43) Pub. Date: Mar. 1, 2012

(54) ANTIBACTERIAL PHAGE, PHAGE PEPTIDES AND METHODS OF USE THEREOF

(75) Inventors: Miguel Ängelo Da Costa Garcia, Lisboa (PT); Carlos Jorge Sousa De São José, Lisboa (PT); Clara Isabel Rodrigues Leandro, Lisboa (PT); Filipa Maria Rodrigues Pardal Dias Antunes Marçal Da Silva, Belas (PT); Sara Ferreira Llorente Grancho Lourenço, Mem Martins (PT)

(73) Assignees: TECNIFAR-INDUSTRIA TECNICA FARMACEUTICA, S.A., Lisboa (PT); TECHNOPHAGE INVESTIGACAO E DESENVOLVIMENTO EM BIOTECNOLOGIA SA, LISBOA (PT)

(21) Appl. No.: 13/148,009

(22) PCT Filed: Feb. 5, 2010
(86) PCT No.: PCT/PT10/00003

§ 371 Date: Oct. 10, 2011

(30) Foreign Application Priority Data
Feb. 6, 2009 (US) 61/150585
Jun. 18, 2009 (US) 61/218345

(51) Int. Cl. A61K 35/76; C07K 14/005; A61K 38/16; A61P 31/04; A01N 37/18; C07H 21/00; C12Q 1/70; C12Q 1/18; A01N 63/00; C12N 7/00; A01P 1/00

(52) U.S. Cl. 424/93.6; 435/235.1; 530/350; 514/2.4; 514/2.7; 514/2.8; 536/23.72; 435/5; 435/32; 530/324

(57) ABSTRACT

The present invention is directed to the field of phage therapy for the treatment and control of bacterial infections. In particular, the present invention is directed to the novel bacteriophages F1245/05, F168/08, F170/08, F770/05, F197/08, F86/06, F87s/06 and F91a/06, isolated polypeptides thereof, compositions comprising one or more of the novel bacteriophages and/or isolated polypeptides and methods for the treatment and prevention of bacterial infection, either alone or in combination with other antibacterial therapies, e.g., antibiotics or other phage therapies.

### RELATED APPLICATIONS

[0001] This International Application claims priority to U.S. Provisional Application Ser. No. 61/150,585, filed Feb. 6, 2009, entitled “Antibacterial Phage and Uses Thereof” and to U.S. Provisional Application Ser. No. 61/218,345, filed Jun. 18, 2009, entitled “Antibacterial Phage, Phage Peptides and Methods of Use Thereof”. Where permitted, the subject matter and contents, including sequence listing, of these provisional applications are incorporated by reference herein in their entirety.

### FIELD OF THE INVENTION

[0002] The present invention is directed to the field of phage therapy for the treatment and control of bacterial infections. In particular, the present invention is directed to the novel bacteriophages F1245/05, F168/08, F170/08, F770/05, F197/08, F86/06, F87s/06 and F91a/06, isolated polypeptides thereof, compositions comprising one or more of the novel bacteriophages and/or isolated polypeptides and methods for the treatment and prevention of bacterial infections caused by Acinetobacter baumannii, Enterococcus faecalis, E. faecium, Pseudomonas aeruginosa, and/or Staphylococcus aureus, either alone or in combination with other antibacterial therapies, e.g., antibiotics or other phage therapies.

### BACKGROUND

[0003] Bacteriophages (phage) are viruses that specifically infect and lyse bacteria. Phage therapy, a method of using whole phage viruses for the treatment of bacterial infectious diseases, was introduced in the 1920s by Felix d'Herelle. Initially, phage therapy was vigorously investigated and numerous studies were undertaken to assess the potential of phage therapy for the treatment of bacterial infection in humans and animals. Early success prompted the development of multiple commercial phage preparations. For example, in 1940 Eli Lilly Company produced 7 phage products for human use, including phage preparations for treating different sicknesses caused by Staphylococcus sp., E. coli and other pathogenic bacteria. These preparations were used to treat infections that cause abscesses, purulent wounds, vaginitis, acute chronic upper-respiratory tract infections and mastoid infections.

[0004] However, with the development of antibiotics in the 1940s, interest in phage-based therapeutics declined in the Western world. One of the most important factors that contributed to this decline was the lack of standardized testing protocols and methods of production. The failure to develop industry wide standards for the testing of phage therapies interfered with the documentation of study results, leading to a perceived lack of efficacy as well as problems of credibility regarding the value of phage therapy. Further, problems related to the production of phage samples/specimens complicated initial study and research. Diverse stabilizers and preservatives were initially used in attempts to increase the viability of the phage therapeutics. However, because the biology of both the phage and the various stabilizers were poorly understood, many of the ingredients added in an attempt to prolong the viability of phage preparations proved to be either toxic to humans or to negatively impact long term storage. Another problem related to phage production was the purity grade of the commercial preparations of these viruses. At the time, phage therapy preparations generally consisted of raw lysates of host bacteria that had been treated with the phage of interest. Thus, many preparations contained what are now recognized as undesired bacterial components, e.g., endotoxins. Accordingly, adverse events were often associated with the preparations, particularly in patients receiving them intravenously. Nevertheless, in Eastern Europe and the former Soviet Union, where access to antibiotics was limited, the development and use of phage therapy continued jointly with, or in place of, antibiotics.

[0005] With the rise of antibiotic resistant strains of bacteria, however, interest in phage-based therapeutics has returned in the Western world. Even though novel classes of antibiotics may be developed, the prospect that bacteria will eventually develop resistance to the new drugs has intensified the search for non-chemotherapeutic means for controlling, preventing, and treating bacterial infections. There are three main phage-based strategies for using phage therapy in a clinical environment: 1) the administration of virulent phages; 2) the use of endolysins or purified lysins encoded by bacteriophages 3) the use of structural proteins of the identified phages as metabolic inhibitors of key enzymes for the synthesis of bacterial peptidoglycan.

[0006] There is therefore a need to develop novel bacteriophages and phage products as potential therapeutic and prophylactic agents for use in vivo to eliminate pathogenic bacteria. In particular, there is a need for bacteriophages capable of lysing nosocomial bacteria, including Acinetobacter baumannii, Enterococcus faecalis, E. faecium, Pseudomonas aeruginosa, and/or Staphylococcus aureus. Because most phage and phage peptides studied to date exhibit activity often restricted to the related species, or subspecies, of bacteria from which they are isolated, the novel phage-based therapies may find particular use in the hospital setting, selectively targeting nosocomial pathogens without affecting the normal surrounding flora.

### SUMMARY OF THE INVENTION

[0007] The present invention is directed to isolated bacteriophages and to isolated antibacterial polypeptides of bacteriophage origin for the treatment, prevention, or management of conditions associated with infection by Gram-positive or Gram-negative bacteria. In particular, the isolated bacteriophage or polypeptides of the invention may be used in pharmaceutical compositions for the treatment, prophylaxis, or management of infection by nosocomial pathogens, e.g., Gram-positive bacteria including but not limited to Enterococcus faecalis, E. faecium, E. hirae, E. avium, Staphylococcus aureus, S. epidermidis, S. auricularis, S. capitis, S. haemolyticus, S. hominis, S. saprophyticus, S. simulans, and S. xylosis; and/or Gram-negative bacteria including but not limited to Acinetobacter baumannii, and Pseudomonas aeruginosa. In certain embodiments, the pharmaceutical compositions of the invention are of use in the treatment of conditions associated with infection by antibiotic resistant strains of bacteria, e.g., methicillin resistant strains of Staphylococcus aureus (MRSA). In particular embodiments, the isolated bacteriophages or polypeptides of the invention are used for the topical treatment of infection by nosocomial pathogens in a subject in need thereof. In other embodiments, the isolated bacteriophages or polypeptides of the invention are used for the diagnosis of the infective agent in a sample (e.g., tissue, blood, urine, sputum sample) derived from a patient. In other embodiments, the isolated bacteriophages or polypeptides of the invention are used as a prophylactic disinfectant or anti-infective for the preparation of solid surfaces, including skin or other epidermal surfaces.

[0008] In certain embodiments, the invention provides an isolated bacteriophage, F168/08 or F170/08, having a genome comprising the nucleic acid sequence of SEQ ID NO:1 or SEQ ID NO:2, respectively, and exhibiting antibacterial activity against one or more strains of Enterococcus faecalis and/or E. faecium. In other embodiments, the invention provides an isolated bacteriophage, F770/05, having a genome comprising the nucleic acid sequence of SEQ ID NO:3 and exhibiting antibacterial activity against one or more strains of Pseudomonas aeruginosa. In yet other embodiments, the invention provides the isolated bacteriophage F197/08, F86/06, F87s/06 or F91a/06 having a genome comprising the nucleic acid sequence of SEQ ID NO:4, SEQ ID NO:5, SEQ ID NO:6 or SEQ ID NO:7, respectively, and exhibiting antibacterial activity against one or more strains of Staphylococcus aureus. In still yet other embodiments, the invention provides an isolated bacteriophage, F1245/05, having a genome comprising the nucleic acid sequence of SEQ ID NO:760 and exhibiting antibacterial activity against one or more strains of Acinetobacter baumannii.

[0009] The invention also encompasses isolated bacteria infected with one or more bacteriophage of the invention. In specific embodiments, the invention provides an isolated E. faecalis infected with a bacteriophage having a genome comprising or consisting of the nucleic acid sequence of SEQ ID NO:1 and/or SEQ ID NO:2. In other embodiments, the invention provides an isolated E. faecium infected with a bacteriophage having a genome comprising or consisting of the nucleic acid sequence of SEQ ID NO:1 and/or SEQ ID NO:2. In still other embodiments, the invention provides an isolated P. aeruginosa infected with a bacteriophage having a genome comprising or consisting of the nucleic acid sequence of SEQ ID NO:3. In yet other embodiments, the invention provides an isolated S. aureus infected with one or more bacteriophages having a genome comprising or consisting of the nucleic acid sequence of SEQ ID NO:4, SEQ ID NO:5, SEQ ID NO:6 and/or SEQ ID NO:7. In still yet other embodiments, the invention provides an isolated A. baumannii infected with a bacteriophage having a genome comprising or consisting of the nucleic acid sequence of SEQ ID NO:760.

[0010] The present invention encompasses polypeptides isolated from bacteriophage F1245/05, F168/08, F170/08, F770/05, F197/08, F86/06, F87s/06 and/or F91a/06, which polypeptides exhibit antibacterial activity against one or more species or strains of Gram-positive or Gram-negative bacterium, e.g., A. baumannii, E. faecalis, E. faecium, P. aeruginosa and/or S. aureus. In specific embodiments, the polypeptides of the invention isolated or derived from F168/08 or F/170/08 exhibit antibacterial or antimicrobial activity, e.g., lytic killing activity, against at least E. faecalis and/or E. faecium; those isolated or derived from F770/05 against at least P. aeruginosa; those isolated or derived from F197/08, F86/06, F87s/06 or F91a/06 against at least S. aureus; and those isolated or derived from F1245/05 against at least A. baumannii.

[0011] In certain embodiments, a polypeptide of the invention comprises or consists of an isolated endolysin or fragment thereof (e.g., a CHAP domain) that exhibits antibacterial activity against one or more species or strains of bacteria, e.g., Gram-positive bacteria and/or Gram-negative bacteria such as A. baumannii, E. faecalis, E. faecium, P. aeruginosa and/or S. aureus. In specific embodiments, the polypeptide of the invention is an isolated lysin protein, e.g., an endolysin or tail lysin, comprising or consisting of the amino acid sequence SEQ ID NO:68, SEQ ID NO:184, SEQ ID NO:202, SEQ ID NO:203, SEQ ID NO:446, SEQ ID NO:447, SEQ ID NO:448, SEQ ID NO:575, SEQ ID NO:641 or SEQ ID NO:712. In yet still other embodiments, the invention provides a polypeptide comprising or consisting of an amino acid sequence selected from the group consisting of SEQ ID NO: 761 to SEQ ID NO: 816.

[0012] In other embodiments, a polypeptide of the invention comprises a fragment, variant or derivative of SEQ ID NO:68, SEQ ID NO:184, SEQ ID NO:202, SEQ ID NO:203, SEQ ID NO:446, SEQ ID NO:447, SEQ ID NO:448, SEQ ID NO:575, SEQ ID NO:641 or SEQ ID NO:712, wherein said fragment, variant or derivative has antibacterial activity or antimicrobial activity, e.g., lytic killing activity, against one or more strains of E. faecalis, E. faecium, P. aeruginosa and/or S. aureus. In specific examples in accordance with this embodiment, the variant, fragment or derivative of the amino acid sequence of SEQ ID NO:68, SEQ ID NO:184, SEQ ID NO:202 and/or SEQ ID NO:203 exhibits antibacterial or antimicrobial activity (e.g., lytic killing activity) against one or more strains of E. faecalis and/or E. faecium. In other examples in accordance with this embodiment, the variant, fragment or derivative of the amino acid sequence of SEQ ID NO:446, SEQ ID NO:447, SEQ ID NO:448, SEQ ID NO:575, SEQ ID NO:641 and/or SEQ ID NO:712 exhibits antibacterial or antimicrobial activity (e.g., lytic killing activity) against one or more strains of S. aureus.

[0013] In specific embodiments, the isolated polypeptide of the invention comprises or consists of the CHAP domain of SEQ ID NO:68, SEQ ID NO:446, SEQ ID NO:575, SEQ ID NO:641 or SEQ ID NO:712. In certain embodiments, the isolated polypeptide comprises or consists of the CHAP domain of SEQ ID NO:68, SEQ ID NO:446, SEQ ID NO:575, SEQ ID NO:641 or SEQ ID NO:712, e.g., having the amino acid sequence of SEQ ID NO:755, SEQ ID NO:756, SEQ ID NO:757, SEQ ID NO:758 or SEQ ID NO:759, respectively. In other embodiments, a polypeptide of the invention comprises a fragment, variant or derivative of SEQ ID NO:755, SEQ ID NO:756, SEQ ID NO:757, SEQ ID NO:758 or SEQ ID NO:759, wherein said fragment, variant or derivative has antibacterial activity or antimicrobial activity, e.g., lytic killing activity, against at least one or more strains of E. faecalis, E. faecium, P. aeruginosa and/or S. aureus. In yet still other embodiments, a polypeptide of the invention comprises a fragment, variant or derivative of SEQ ID NO: 761 to SEQ ID NO: 816, wherein said fragment, variant or derivative has antibacterial activity or antimicrobial activity, e.g., lytic killing activity, against at least one or more strains of A. baumannii.

[0014] In other embodiments, a polypeptide of the invention comprises or consists of an isolated tail length tape measure protein or tail protein (e.g., tail component, tail fiber protein, adsorption associated tail protein), or fragment thereof, having a biologic function associated with the bacteriophage from which it is derived, e.g., antimicrobial or antibacterial activity (e.g., lytic killing activity), which function is directed against at least one or more species or strains of E. faecalis, E. faecium, P. aeruginosa, S. aureus, and/or A. baumannii. In specific embodiments, the polypeptide of the invention is an isolated tail length tape measure protein or tail proteins comprising or consisting of the amino acid sequence SEQ ID NO:61, SEQ ID NO:63, SEQ ID NO:204, SEQ ID NO:214, SEQ ID NO:435, SEQ ID NO:438, SEQ ID NO:440, SEQ ID NO:525, SEQ ID NO:526, SEQ ID NO:527, SEQ ID NO:528, SEQ ID NO:529, SEQ ID NO:530, SEQ ID NO:531, SEQ ID NO:532, SEQ ID NO:533, SEQ ID NO:534, SEQ ID NO:535, SEQ ID NO:536, SEQ ID NO:537, SEQ ID NO:538, SEQ ID NO:539, SEQ ID NO:567, SEQ ID NO:568, SEQ ID NO:632, SEQ ID NO:633, SEQ ID NO:700, SEQ ID NO:701, SEQ ID NO:702, SEQ ID NO:703, SEQ ID NO:704 or SEQ ID NO:795. In other embodiments, a polypeptide of the invention comprises a fragment, variant or derivative of SEQ ID NO:61, SEQ ID NO:63, SEQ ID NO:204, SEQ ID NO:214, SEQ ID NO:435, SEQ ID NO:438, SEQ ID NO:440, SEQ ID NO:525, SEQ ID NO:526, SEQ ID NO:527, SEQ ID NO:528, SEQ ID NO:529, SEQ ID NO:530, SEQ ID NO:531, SEQ ID NO:532, SEQ ID NO:533, SEQ ID NO:534, SEQ ID NO:535, SEQ ID NO:536, SEQ ID NO:537, SEQ ID NO:538, SEQ ID NO:539, SEQ ID NO:567, SEQ ID NO:568, SEQ ID NO:632, SEQ ID NO:633, SEQ ID NO:700, SEQ ID NO:701, SEQ ID NO:702, SEQ ID NO:703, SEQ ID NO:704 or SEQ ID NO:795, wherein said fragment, variant or derivative exhibits a biologic function associated with the bacteriophage from which it is derived, e.g., antimicrobial or antibacterial activity (e.g., lytic killing activity), which function is directed against one or more strains of E. faecalis, E. faecium, P. aeruginosa, S. aureus, and/or A. baumannii.

[0015] In certain embodiments, the invention encompasses a variant, fragment or derivative of the amino acid sequence of SEQ ID NO:61 or SEQ ID NO:63 that exhibits a biologic function associated with the bacteriophage having a genome comprising or consisting of the nucleic acid sequence SEQ ID N0:1, e.g., antimicrobial or antibacterial activity (e.g., lytic killing activity), which function is directed against one or more strains of E. faecalis and/or E. faecium. In other embodiments, the invention encompasses a variant, fragment or derivative of the amino acid sequence of SEQ ID NO:204 or SEQ ID NO:214 that exhibits a biologic function associated with the bacteriophage having a genome comprising or consisting of the nucleic acid sequence SEQ ID NO:2, e.g., antimicrobial or antibacterial activity (e.g., lytic killing activity), which function is directed against one or more strains of E. faecalis and/or E. faecium.

[0016] In certain embodiments, the invention encompasses a variant, fragment or derivative of the amino acid sequence of SEQ ID NO:435 or SEQ ID NO:438 that exhibits a biologic function associated with the bacteriophage having a genome comprising or consisting of the nucleic acid sequence SEQ ID NO:3, e.g., antimicrobial or antibacterial activity (e.g., lytic killing activity), which function is directed against one or more strains of P. aeruginosa.

[0017] In certain embodiments, the invention encompasses a variant, fragment or derivative of the amino acid sequence of SEQ ID NO:440, SEQ ID NO:525, SEQ ID NO:526, SEQ ID NO:527, SEQ ID NO:528, SEQ ID NO:529, SEQ ID NO:530, SEQ ID NO:531, SEQ ID NO:532, SEQ ID NO:533, SEQ ID NO:534, SEQ ID NO:535, SEQ ID NO:536, SEQ ID NO:537, SEQ ID NO:538 or SEQ ID NO:539 that exhibits a biologic function associated with the bacteriophage having a genome comprising or consisting of the nucleic acid sequence SEQ ID NO:4, e.g., antimicrobial or antibacterial activity (e.g., lytic killing activity), which function is directed against one or more strains of S. aureus. In other embodiments, the invention encompasses a variant, fragment or derivative of the amino acid sequence of SEQ ID NO:567 or SEQ ID NO:568 that exhibits a biologic function associated with the bacteriophage having a genome comprising or consisting of the nucleic acid sequence SEQ ID NO:5, e.g., antimicrobial or antibacterial activity (e.g., lytic killing activity), which function is directed against one or more strains of S. aureus. In yet other embodiments, the invention encompasses a variant, fragment or derivative of the amino acid sequence of SEQ ID NO:632 or SEQ ID NO:633 that exhibits a biologic function associated with the bacteriophage having a genome comprising or consisting of the nucleic acid sequence SEQ ID NO:6, e.g., antimicrobial or antibacterial activity (e.g., lytic killing activity), which function is directed against one or more strains of S. aureus. In yet other embodiments, the invention encompasses a variant, fragment or derivative of the amino acid sequence of SEQ ID NO:700, SEQ ID NO:701, SEQ ID NO:702, SEQ ID NO:703 or SEQ ID NO:704 that exhibits a biologic function associated with the bacteriophage having a genome comprising or consisting of the nucleic acid sequence SEQ ID NO:7, e.g., antimicrobial or antibacterial activity (e.g., lytic killing activity), which function is directed against one or more strains of S. aureus.

[0018] In certain embodiments, the invention encompasses a variant, fragment or derivative of the amino acid sequence of SEQ ID NOS: 761-816 that exhibits a biologic function associated with the bacteriophage having a genome comprising or consisting of the nucleic acid sequence SEQ ID NO:760, e.g., antimicrobial or antibacterial activity (e.g., lytic killing activity), which function is directed against one or more strains of A. baumannii.

[0019] In certain embodiments, the invention provides for isolated polypeptides that exhibit antimicrobial or antibacterial activity (e.g., lytic killing activity) against one or more strains of bacteria (e.g., Gram-positive bacteria (e.g., E. faecalis, E. faecium, S. aureus), Gram-negative bacteria (e.g., of A. baumannii, P. aeruginosa) or bacteria not classified as either Gram-positive or Gram-negative), wherein the isolated polypeptides have an amino acid sequence with at least 60%, 65%, 70%, 75%, 80%, 85%, 86%, 87%, 88%, 89%, 90%, 91%, 92%, 93%, 94%, 95%, 96%, 97%, 98%, 99%, or greater sequence identity to a second amino acid sequence of the same length (i.e., consisting of the same number of residues), which second amino acid sequence is SEQ ID NO:61, SEQ ID NO:63, SEQ ID NO:68, SEQ ID NO:184, SEQ ID NO:202, SEQ ID NO:203, SEQ ID NO:204, SEQ ID NO:214, SEQ ID NO:435, SEQ ID NO:438, SEQ ID NO:440, SEQ ID NO:446, SEQ ID NO:447, SEQ ID NO:448, SEQ ID NO:525, SEQ ID NO:526, SEQ ID NO:527, SEQ ID NO:528, SEQ ID NO:529, SEQ ID NO:530, SEQ ID NO:531, SEQ ID NO:532, SEQ ID NO:533, SEQ ID NO:534, SEQ ID NO:535, SEQ ID NO:536, SEQ ID NO:537, SEQ ID NO:538, SEQ ID NO:539, SEQ ID NO:567, SEQ ID NO:568, SEQ ID NO:575, SEQ ID NO:632, SEQ ID NO:633, SEQ ID NO:641, SEQ ID NO:700, SEQ ID NO:701, SEQ ID NO:702, SEQ ID NO:703, SEQ ID NO:704, SEQ ID NO:712, SEQ ID NO:755, SEQ ID NO:756, SEQ ID NO:757, SEQ ID NO:758, SEQ ID NO:759, SEQ ID NOS:761-816, and/or a fragment thereof.

[0020] The invention further provides isolated polypeptides comprising or consisting of the amino acid sequence of any of SEQ ID NOS:8-130, SEQ ID NOS:131-343, SEQ ID NOS:344-438, SEQ ID NOS:439-553, SEQ ID NOS:554-616, SEQ ID NOS:617-681, SEQ ID NOS:682-759, and SEQ ID NOS:761-816. In other embodiments, isolated polypeptides of the invention recombinantly fused or chemically conjugated (e.g., covalent or non-covalent conjugation) to therapeutic agents (e.g., heterologous polypeptides or small molecules) are provided.

[0021] The invention also encompasses polynucleotides that encode the polypeptides of the invention. In a specific embodiment, the invention provides an isolated nucleic acid comprising a nucleic acid sequence encoding the polypeptide of any of SEQ ID NOS:8-130, SEQ ID NOS:131-343, SEQ ID NOS:344-438, SEQ ID NOS:439-553, SEQ ID NOS:554-616, SEQ ID NOS:617-681, SEQ ID NOS:682-759, and SEQ ID NOS 761-816. In other embodiments, the invention provides an isolated nucleic acid comprising a nucleic acid sequence encoding the polypeptide of any of SEQ ID NO:61, SEQ ID NO:63, SEQ ID NO:68, SEQ ID NO:184, SEQ ID NO:202, SEQ ID NO:203, SEQ ID NO:204, SEQ ID NO:214, SEQ ID NO:435, SEQ ID NO:438, SEQ ID NO:440, SEQ ID NO:446, SEQ ID NO:447, SEQ ID NO:448, SEQ ID NO:525, SEQ ID NO:526, SEQ ID NO:527, SEQ ID NO:528, SEQ ID NO:529, SEQ ID NO:530, SEQ ID NO:531, SEQ ID NO:532, SEQ ID NO:533, SEQ ID NO:534, SEQ ID NO:535, SEQ ID NO:536, SEQ ID NO:537, SEQ ID NO:538, SEQ ID NO:539, SEQ ID NO:567, SEQ ID NO:568, SEQ ID NO:575, SEQ ID NO:632, SEQ ID NO:633, SEQ ID NO:641, SEQ ID NO:700, SEQ ID NO:701, SEQ ID NO:702, SEQ ID NO:703, SEQ ID NO:704, SEQ ID NO:712, SEQ ID NO:755, SEQ ID NO:756, SEQ ID NO:757, SEQ ID NO:758, SEQ ID NO:759, SEQ ID NOS 761-816, or active fragment, variant or derivative thereof, which polypeptide or active fragment, variant or derivative exhibits a biologic function associated with the bacteriophage from which it is isolated and/or derived, e.g., antimicrobial or antibacterial activity (e.g., lytic killing activity). The invention also relates to a vector comprising said nucleic acid. In one specific embodiment, said vector is an expression vector. The invention further provides host cells containing a vector comprising polynucleotides encoding the polypeptides of the invention.

[0022] The present invention encompasses methods for the production of polypeptides of the invention or active fragments thereof, in particular for use in pharmaceutical compositions, i.e., antimicrobial compositions. For example, the polypeptides of the invention may be isolated directly from cell cultures (e.g., bacterial cell cultures) infected with bacteriophage F1245/05, F168/08, F170/08, F770/05, F197/08, F86/06, F87s/06 or F91a/06. Alternatively, the polypeptides of the present invention may be derived by recombinant means using expression vectors comprising nucleic acid sequence encoding polypeptides of the invention, e.g., SEQ ID NO:61, SEQ ID NO:63, SEQ ID NO:68, SEQ ID NO:184, SEQ ID NO:202, SEQ ID NO:203, SEQ ID NO:204, SEQ ID NO:214, SEQ ID NO:435, SEQ ID NO:438, SEQ ID NO:440, SEQ ID NO:446, SEQ ID NO:447, SEQ ID NO:448, SEQ ID NO:525, SEQ ID NO:526, SEQ ID NO:527, SEQ ID NO:528, SEQ ID NO:529, SEQ ID NO:530, SEQ ID NO:531, SEQ ID NO:532, SEQ ID NO:533, SEQ ID NO:534, SEQ ID NO:535, SEQ ID NO:536, SEQ ID NO:537, SEQ ID NO:538, SEQ ID NO:539, SEQ ID NO:567, SEQ ID NO:568, SEQ ID NO:575, SEQ ID NO:632, SEQ ID NO:633, SEQ ID NO:641, SEQ ID NO:700, SEQ ID NO:701, SEQ ID NO:702, SEQ ID NO:703, SEQ ID NO:704, SEQ ID NO:712, SEQ ID NO:755, SEQ ID NO:756, SEQ ID NO:757, SEQ ID NO:758, SEQ ID NO:759, SEQ ID NOS:761-816, or active fragments, derivatives or variants thereof. The polypeptides of the invention or fragments thereof can be produced by any method known in the art for the production of a polypeptide, in particular, by chemical synthesis or by recombinant expression techniques. In specific embodiments, the invention relates to a method for recombinantly producing a phage protein, e.g., a lysin protein, tail protein or active fragment, variant or derivative thereof, said method comprising: (i) culturing under conditions suitable for the expression of said protein in a medium, a host cell containing a vector comprising a nucleic acid sequence encoding the amino acid sequence SEQ ID NO:61, SEQ ID NO:63, SEQ ID NO:68, SEQ ID NO:184, SEQ ID NO:202, SEQ ID NO:203, SEQ ID NO:204, SEQ ID NO:214, SEQ ID NO:435, SEQ ID NO:438, SEQ ID NO:440, SEQ ID NO:446, SEQ ID NO:447, SEQ ID NO:448, SEQ ID NO:525, SEQ ID NO:526, SEQ ID NO:527, SEQ ID NO:528, SEQ ID NO:529, SEQ ID NO:530, SEQ ID NO:531, SEQ ID NO:532, SEQ ID NO:533, SEQ ID NO:534, SEQ ID NO:535, SEQ ID NO:536, SEQ ID NO:537, SEQ ID NO:538, SEQ ID NO:539, SEQ ID NO:567, SEQ ID NO:568, SEQ ID NO:575, SEQ ID NO:632, SEQ ID NO:633, SEQ ID NO:641, SEQ ID NO:700, SEQ ID NO:701, SEQ ID NO:702, SEQ ID NO:703, SEQ ID NO:704, SEQ ID NO:712, SEQ ID NO:755, SEQ ID NO:756, SEQ ID NO:757, SEQ ID NO:758, SEQ ID NO:759, SEQ ID NOS:761-816, or fragment thereof; and (ii) recovery of said protein from said medium. In certain embodiments, the nucleic acid sequence encoding the polypeptide of the invention is operably linked to a heterologous promoter.

[0023] The invention also encompasses methods for the diagnosis of the causative agent in a clinical presentation of bacterial infection. The isolated bacteriophages or polypeptides of the invention may be used to aid in the determination of species of bacteria in a patient sample by establishing susceptibility of the bacteria in the sample to the bacteriophages and/or polypeptides of the invention. Such methods further encompass methods of evaluation of antibacterial activity of the isolated bacteriophages and/or polypeptides of the invention. Antibacterial activity of the bacteriophages or the polypeptides of the invention, or susceptibility of an unknown sample to such activity, may be assessed by any method known in the art and/or described herein. In certain embodiments, antibacterial activity and/or susceptibility is assessed by culturing known bacteria and/or patient tissue, blood, fluid or swab samples according to standard techniques (e.g., in liquid culture or on agar plates), contacting the culture with bacteriophages and/or polypeptides of the invention and monitoring cell growth after said contacting. For example, in a liquid culture, the bacteria (e.g., A. baumannii, E. faecalis, E. faecium, P. aeruginosa, S. aureus) may be grown to a optical density (“OD”) representative of a mid-point in exponential growth of the culture; the culture is exposed to one or more concentrations of one or more bacteriophages and/or polypeptides of the invention and the OD is monitored relative to a control culture. Decreased OD relative to a control culture is representative of a bacteriophage and/or polypeptide exhibiting antibacterial activity (e.g., exhibits lytic killing activity) against the tested sample or bacterial species and/or strain in the culture. Similarly, bacterial colonies can be allowed to form on an agar plate, the plate exposed to a bacteriophage or polypeptide of the invention, and subsequent growth of the colonies evaluated relative to control plates. Decreased size of colonies, or decreased total numbers of colonies, indicates a bacteriophage and/or polypeptide with antibacterial activity against the tested sample and/or cultured species or strain.

[0024] The present invention is also directed to pharmaceutical compositions comprising or consisting of a bacteriophage having a genome comprising or consisting of the nucleic acid sequence SEQ ID NO:1, SEQ ID NO:2, SEQ ID NO:3, SEQ ID NO:4, SEQ ID NO:5, SEQ ID NO:6 or SEQ ID NO:7, or SEQ ID NO:760. In certain embodiments, the pharmaceutical composition of the invention comprises a bacteriophage having the genome comprising or consisting of the nucleic acid sequence SEQ ID NO:1, SEQ ID NO:2, SEQ ID NO:3, SEQ ID NO:4, SEQ ID NO:5, SEQ ID NO:6 or SEQ ID NO:7, or SEQ ID NO:760 in addition to one or more other bacteriophages. The one or more other bacteriophages may be one or more bacteriophages of the invention (e.g., having a genome comprising or consisting of a nucleic acid sequence of SEQ ID NO:1, SEQ ID NO:2, SEQ ID NO:3, SEQ ID NO:4, SEQ ID NO:5, SEQ ID NO:6 or SEQ ID NO:7, or SEQ ID NO:760), one or more strains thereof, or may be one or more bacteriophages known in the art. Further, the one or more bacteriophages in the pharmaceutical composition of the invention may target the same or different species or strains of bacteria. In certain embodiments, the pharmaceutical compositions comprising one or more bacteriophages of the invention further comprise one or more polypeptides of the invention and/or other phage products as described herein or known in the art.

[0025] In certain embodiments, the invention provides pharmaceutical compositions comprising polypeptides, or active fragments thereof, in particular those having anti-microbial and/or antibacterial activity, isolated from bacteriophage having a genome comprising or consisting of the nucleic acid sequence SEQ ID NO:1, SEQ ID NO:2, SEQ ID NO:3, SEQ ID NO:4, SEQ ID NO:5, SEQ ID NO:6 SEQ ID NO:7, and/or SEQ ID NO:760. In specific embodiments, the pharmaceutical compositions of the invention comprise one or more polypeptides having an amino acid sequence of SEQ ID NO:61, SEQ ID NO:63, SEQ ID NO:68, SEQ ID NO:184, SEQ ID NO:202, SEQ ID NO:203, SEQ ID NO:204, SEQ ID NO:214, SEQ ID NO:435, SEQ ID NO:438, SEQ ID NO:440, SEQ ID NO:446, SEQ ID NO:447, SEQ ID NO:448, SEQ ID NO:525, SEQ ID NO:526, SEQ ID NO:527, SEQ ID NO:528, SEQ ID NO:529, SEQ ID NO:530, SEQ ID NO:531, SEQ ID NO:532, SEQ ID NO:533, SEQ ID NO:534, SEQ ID NO:535, SEQ ID NO:536, SEQ ID NO:537, SEQ ID NO:538, SEQ ID NO:539, SEQ ID NO:567, SEQ ID NO:568, SEQ ID NO:575, SEQ ID NO:632, SEQ ID NO:633, SEQ ID NO:641, SEQ ID NO:700, SEQ ID NO:701, SEQ ID NO:702, SEQ ID NO:703, SEQ ID NO:704, SEQ ID NO:712, SEQ ID NO:755, SEQ ID NO:756, SEQ ID NO:757, SEQ ID NO:758, SEQ ID NO:759 or SEQ ID NOS:761-816. In other embodiments, the pharmaceutical compositions of the invention comprise a polypeptide that is a variant, derivative or fragment of SEQ ID NO:61, SEQ ID NO:63, SEQ ID NO:68, SEQ ID NO:184, SEQ ID NO:202, SEQ ID NO:203, SEQ ID NO:204, SEQ ID NO:214, SEQ ID NO:435, SEQ ID NO:438, SEQ ID NO:440, SEQ ID NO:446, SEQ ID NO:447, SEQ ID NO:448, SEQ ID NO:525, SEQ ID NO:526, SEQ ID NO:527, SEQ ID NO:528, SEQ ID NO:529, SEQ ID NO:530, SEQ ID NO:531, SEQ ID NO:532, SEQ ID NO:533, SEQ ID NO:534, SEQ ID NO:535, SEQ ID NO:536, SEQ ID NO:537, SEQ ID NO:538, SEQ ID NO:539, SEQ ID NO:567, SEQ ID NO:568, SEQ ID NO:575, SEQ ID NO:632, SEQ ID NO:633, SEQ ID NO:641, SEQ ID NO:700, SEQ ID NO:701, SEQ ID NO:702, SEQ ID NO:703, SEQ ID NO:704, SEQ ID NO:712, SEQ ID NO:755, SEQ ID NO:756, SEQ ID NO:757, SEQ ID NO:758, SEQ ID NO:759, or SEQ ID NOS:761-816 wherein the variant, derivative or fragment retains a biologic function of the polypeptide from which it is derived, e.g., antimicrobial or antibacterial activity (e.g., lytic killing activity), preferably against one or more strains of A. baumannii, E. faecalis, E. faecium, P. aeruginosa and/or S. aureus.

[0026] The pharmaceutical compositions of the invention may additionally comprise a pharmaceutically acceptable carrier, excipient, or stabilizer. In certain embodiments, the pharmaceutical compositions of the invention are antibiotic compositions (in that they exhibit antibacterial activity) or therapeutic compositions for the treatment, prevention, and/or amelioration of symptoms of a disease or disorder associated with infection by bacteria in a subject in need thereof. In specific embodiments, the pharmaceutical compositions of the invention are antibacterial compositions or therapeutic compositions for the treatment, prevention, and/or amelioration of symptoms of a disease or disorder associated with infection by A. baumannii, E. faecalis, E. faecium, P. aeruginosa and/or S. aureus. In certain embodiments, the subject receiving a pharmaceutical composition of the invention is a mammal (e.g., bovine, ovine, caprine, equid, primate (e.g., human), rodent, lagomorph or avian (e.g., chicken, duck, goose)).

[0027] The present invention provides for methods for the treatment or prevention of bacterial infection comprising administering to a subject in need thereof a pharmaceutical composition comprising one or more bacteriophages or phage products (e.g., an isolated bacteriophage polypeptide or active fragment, variant or derivative thereof), optionally in addition to one or more other bacteriophages or other phage products, as described herein. In the context of the present invention, “treatment” refers to both therapeutic treatment and prophylactic or preventative measures, wherein the object is to eliminate, lessen, decrease the severity of, slow the progression of or delay or prevent the symptoms or underlying cause (e.g., bacterial infection) associated with the pathological condition or disorder. The pharmaceutical compositions of the present invention may be used in the treatment or management of infections associated with any bacterial infection, including, but not limited to A. baumanni, S. aureus, S. epidermidis, S. auricularis, S. capitis, S. haemolyticus, S. hominis, S. saprophyticus, S. simulans, S. xylosis, M. luteus, B. subtilis, B. pumilus, E. faecalis, E. hirae, E. faecium, E. avium, P. aeruginosa and combinations thereof. In certain embodiments, the pharmaceutical compositions may be used to treat conditions or disorders associated with bacterial infections including, but not limited to, post-operative endophtalmitis, endocarditis, infections of the central nervous system, pneumonia, osteomylelitis, wound infections (e.g., diabetic foot ulcers), mastitis, septicemia, food poisoning and meningitis and/or other conditions associated with nosocomial bacterial infections.

[0028] In certain embodiments, the invention provides for the use of a bacteriophage or an isolated phage product (e.g., an isolated phage polypeptide or active fragment, variant or derivative thereof) as a single agent therapy. In other embodiments, the invention provides for the use of a bacteriophage, or phage product (e.g., an isolated phage polypeptide or active fragment, variant or derivative thereof), in combination with a standard or experimental treatment for bacterial infection. Such combination therapy may enhance the efficacy of the standard or experimental treatment. Examples of therapeutic agents that are particularly useful in combination with a polypeptide of the invention are anti-inflammatory agents, standard chemotherapeutic antibiotic agents (e.g., penicillin, synthetic penicillins, bacitracin, methicillin, cephalosporin, polymyxin, cefaclor, Cefadroxil, cefamandole nafate, cefazolin, cefixime, cefmetazole, cefonioid, cefoperazone, ceforanide, cefotanme, cefotaxime, cefotetan, cefoxitin, cefpodoxime proxetil, ceftazidime, ceftizoxime, ceftriaxone, cefriaxone moxalactam, cefuroxime, cephalexin, cephalosporin C, cephalosporin C sodium salt, cephalothin, cephalothin sodium salt, cephapirin, cephradine, cefuroximeaxetil, dihydratecephalothin, moxalactam, loracarbef mafate and chelating agents), local anesthetic agents, and/or corticosteroids. In yet another embodiment, the compositions of the present invention may be combined with one or more bacteriophages or phage products known in the art. The combination therapies encompassed by the invention may be formulated into a single pharmaceutical composition or may be administered in separate compositions, but as part of an overall treatment regimen.

[0029] The pharmaceutical compositions of the invention may be administered by any method known in the art suitable for administration of an antibacterial compound (e.g., via oral or parenteral (e.g., inhalation, intramuscular, intravenous, or epidermal)) delivery. In preferred embodiments, the pharmaceutical compositions of the invention are administered topically, e.g., in a topical formulation. The compositions of the invention may be used topically to treat and/or prevent common nosocomial infections, such as infections at surgical incision sites or associated with catheters or drains. In other embodiments, the compositions of the invention are use to treat bacterial infections of the skin or upper dermal layers (e.g., infections of diabetic ulcers of the foot).

[0030] The pharmaceutical compositions of the present invention may also be used for traditionally non-therapeutic uses such as antibacterial agents in cosmetics, or in sprays or solutions for use on solid surfaces to prevent the colonization of bacteria (i.e., as disinfectants).

[0031] The present invention is also directed to methods for screening peptides for antibacterial activity. In one embodiment the method comprises screening contiguous amino acid sequences of at least 6, 10, 15, 20 or 25 residues in length that are encoded by the open reading frames of the nucleic acid sequence SEQ ID NO:1, SEQ ID NO:2, SEQ ID NO:3, SEQ ID NO:4, SEQ ID NO:5, SEQ ID NO:6, SEQ ID NO:7, or SEQ ID NO:760 for antibacterial activity, said antibacterial activity measured by the peptides ability to inhibit bacterial growth in agar or liquid culture.

### 4.1 Definitions

[0032] As used herein, the term “fragment” refers to a peptide or polypeptide comprising an amino acid sequence of at least 5 contiguous amino acid residues, at least 10 contiguous amino acid residues, at least 15 contiguous amino acid residues, at least 20 contiguous amino acid residues, at least 25 contiguous amino acid residues, at least 40 contiguous amino acid residues, at least 50 contiguous amino acid residues, at least 60 contiguous amino residues, at least 70 contiguous amino acid residues, at least contiguous 80 amino acid residues, at least contiguous 90 amino acid residues, at least contiguous 100 amino acid residues, at least contiguous 125 amino acid residues, at least 150 contiguous amino acid residues, at least contiguous 175 amino acid residues, at least contiguous 200 amino acid residues, or at least contiguous 250 amino acid residues of the amino acid sequence of a protein. In a specific embodiment, the fragment is a functional fragment in that it retains at least one function of the protein from which it is isolated (e.g., antimicrobial or antibacterial activity (e.g., lytic cell killing)).

[0033] As used herein the terms “active bacteriophage products” and “bacteriophage products” refer to polypeptides, or fragments, variants or derivatives thereof, isolated from a bacteriophage of the invention, which polypeptide, or fragment, variant or derivative thereof, exhibits a biological function or activity associated with the bacteriophage from which it was isolated or derived (e.g., antimicrobial or antibacterial activity (e.g., lytic cell killing)).

[0034] As used herein, the term “isolated” in the context of a peptide, polypeptide, or fusion protein or refers to a peptide, polypeptide or fusion protein that is substantially free of cellular material or contaminating proteins from the cell or tissue source from which it is derived, or substantially free of chemical precursors or other chemicals when chemically synthesized. The language “substantially free of cellular material” includes preparations of a peptide, polypeptide or fusion protein in which the peptide, polypeptide or fusion protein is separated from cellular components of the cells from which it is isolated or recombinantly produced. Thus, a peptide, polypeptide or fusion protein that is substantially free of cellular material includes preparations of a peptide, polypeptide or fusion protein having less than about 30%, 20%, 10%, or 5% (by dry weight) of heterologous protein (also referred to herein as a “contaminating protein”). When the peptide, polypeptide or fusion protein is recombinantly produced, it is also preferably substantially free of culture medium, i.e., culture medium represents less than about 20%, 10%, or 5% of the volume of the protein preparation. When the peptide, polypeptide or fusion protein is produced by chemical synthesis, it is preferably substantially free of chemical precursors or other chemicals, i.e., it is separated from chemical precursors or other chemicals which are involved in the synthesis of the peptide, polypeptide or fusion protein. Accordingly such preparations of a peptide, polypeptide, fusion protein or antibody have less than about 30%, 20%, 10%, 5% (by dry weight) of chemical precursors or compounds other than the peptide, polypeptide or fusion protein of interest.

[0035] As used herein, the term “isolated” in the context of nucleic acid molecules refers to a nucleic acid molecule which is separated from other nucleic acid molecules which are present in the natural source of the first nucleic acid molecule. Moreover, an “isolated” nucleic acid molecule, such as a cDNA molecule, is substantially free of other cellular material, or culture medium when produced by recombinant techniques, or substantially free of chemical precursors or other chemicals when chemically synthesized and may be free of cDNA or other genomic DNA molecules, e.g., has been isolated from other clones in a nucleic acid library.

[0036] The term “purified” means that the peptide, polypeptide, fusion protein or nucleic acid molecule has been measurably increased in concentration by any purification process, including but not limited to, column chromatography, HPLC, precipitation, electrophoresis, etc., thereby partially, substantially, or completely removing impurities such as precursors or other chemicals involved in preparing the peptide, polypeptide, fusion protein or nucleic acid molecule. One of skill in the art will appreciate the amount of purification necessary for a given use. For example, isolated protein meant for use in therapeutic compositions intended for administration to humans ordinarily must be of high purity in accordance with regulatory standards and good manufacturing processes.

[0037] As used herein, the term “derivative” in the context of polypeptides refers to a polypeptide that comprises an amino acid sequence which has been altered by the introduction of amino acid residue substitutions, deletions or additions. The term “derivative” as used herein also refers to a polypeptide that has been modified, i.e., by the covalent attachment of any type of molecule to the polypeptide. For example, but not by way of limitation, a polypeptide may be modified, e.g., by glycosylation, acetylation, pegylation, phosphorylation, amidation, derivatization by known protecting/blocking groups, proteolytic cleavage, linkage to a cellular ligand or other protein, etc. A derivative polypeptide may be produced by chemical modifications using techniques known to those of skill in the art, including, but not limited to specific chemical cleavage, acetylation, formylation, metabolic synthesis of tunicamycin, etc. Further, a derivative polypeptide may contain one or more non-classical amino acids. A polypeptide derivative possesses a similar or identical function as the polypeptide from which it was derived. The term “derived” as used in reference to a polypeptide “derived” from an organism may also refer to isolation of a polypeptide directly from said organism (e.g. bacterial cells or phage).

[0038] As used herein, the term “host cell” refers to the particular subject cell transfected with a nucleic acid molecule and the progeny or potential progeny of such a cell that contain the nucleic acid molecule or chromosomally integrated version thereof. Progeny of such a cell may not be identical to the parent cell transfected with the nucleic acid molecule due to mutations or environmental influences that may occur in succeeding generations or integration of the nucleic acid molecule into the host cell genome. For the expression of bacteriophage proteins and polypeptides, the host cell is preferably not of the same species or strain from which the bacteriophage was isolated or cultured.

[0039] As used herein, the term “in combination” refers to the use of more than one prophylactic and/or therapeutic agent. The use of the term “in combination” does not restrict the order in which prophylactic and/or therapeutic agents are administered to a subject with a disease or disorder. A first prophylactic or therapeutic agent can be administered prior to (e.g., 5 minutes, 15 minutes, 30 minutes, 45 minutes, 1 hour, 2 hours, 4 hours, 6 hours, 12 hours, 24 hours, 48 hours, 72 hours, 96 hours, 1 week, 2 weeks, 3 weeks, 4 weeks, 5 weeks, 6 weeks, 8 weeks, or 12 weeks before), concomitantly with, or subsequent to (e.g., 5 minutes, 15 minutes, 30 minutes, 45 minutes, 1 hour, 2 hours, 4 hours, 6 hours, 12 hours, 24 hours, 48 hours, 72 hours, 96 hours, 1 week, 2 weeks, 3 weeks, 4 weeks, 5 weeks, 6 weeks, 8 weeks, or 12 weeks after) the administration of a second prophylactic or therapeutic agent (different from the first prophylactic or therapeutic agent) to a subject with a disease or disorder.

[0040] As used herein, the terms “nucleic acids” and “nucleotide sequences” include single-stranded and double-stranded DNA and/or RNA molecules, or combinations thereof. As used herein, the term “encoded by the nucleic acid” refers to an amino acid sequence that results from the translation of the forward, reverse, complementary or reverse-complementary sequence of the referenced nucleic acid sequence using the standard genetic code (i.e., standard codon triplets) as well known in the art.

[0041] As used herein, the terms “prophylactic agent” and “prophylactic agents” refer to bacteriophages and/or polypeptides of the invention, which can be used in the prevention, treatment, management or amelioration of one or more symptoms associated with infection by a bacterium.

[0042] As used herein, the terms “therapeutic agent” and “therapeutic agents” refer to bacteriophages and/or polypeptides of the invention that can be used in the prevention, treatment, management or amelioration of one or more symptoms of a disease or disorder, in particular, a disease or disorder associated with a bacterial infection.

[0043] As used herein, the term “therapeutically effective amount” refers to that amount of a therapeutic agent sufficient to result in amelioration of one or more symptoms of a disease or disorder, in particular, a disease or disorder associated with a bacterial infection.

[0044] As used herein, the terms “treat”, “treatment” and “treating” refer to the amelioration of one or more symptoms associated with a bacterial infection that results from the administration of one or more bacteriophages and/or polypeptides of the invention. As noted above, “treatment” and related terms refer to both therapeutic treatment and prophylactic or preventative measures, wherein the object is to eliminate, lessen, decrease the severity of, slow the progression of, or delay or prevent the symptoms or underlying cause (e.g., bacterial infection) associated with the pathological condition or disorder.

[0045] As used herein, the terms “antibacterial activity” and “antimicrobial activity” with reference to a bacteriophage, isolated bacteriophage protein (or variant, derivative or fragment thereof), or bacteriophage product, are used interchangeably to refer to the ability to kill and/or inhibit the growth or reproduction of a microorganism, in particular, the bacteria of the species or strain that the bacteriophage infects. In certain embodiments, antibacterial or antimicrobial activity is assessed by culturing bacteria (e.g., Gram-positive bacteria (e.g., E. faecalis, E. faecium, S. aureus), Gram-negative bacteria (e.g., A. baumannii, P. aeruginosa) or bacteria not classified as either Gram-positive or Gram-negative) according to standard techniques (e.g., in liquid culture or on agar plates), contacting the culture with a bacteriophage or polypeptide of the invention and monitoring cell growth after said contacting. For example, in a liquid culture, the bacteria may be grown to an optical density (“OD”) representative of a mid-point in exponential growth of the culture; the culture is exposed to one or more concentrations of one or more bacteriophages or polypeptides of the invention and the OD is monitored relative to a control culture. Decreased OD relative to a control culture is representative of a bacteriophage or polypeptide exhibiting antibacterial activity (e.g., exhibits lytic killing activity). Similarly, bacterial colonies can be allowed to form on an agar plate, the plate exposed to a bacteriophage or polypeptide of the invention, and subsequent growth of the colonies evaluated related to control plates. Decreased size of colonies, or decreased total numbers of colonies, indicate a bacteriophage or polypeptide with antibacterial activity.

[0046] As used herein, a “CHAP domain” refers to a conserved amidase domain found in several phage-encoded peptidoglycan hydrolases and stands for for “cysteine, histidine-dependent amidohydrolases/peptidases.” See, e.g., Rigden D, et. al., Trends Biochem Sci. 2003 May 28(5): 230-4. It is found in a superfamily of amidases, including GSP amidase and peptidoglycan hydrolases. The family includes at least two different types of peptidoglycan cleavage activities: L-muramoyl-L-alanine amidase and D-alanyl-glycyl endopeptidase activity. CHAP domains generally contain conserved cysteine and histidine residues and hydrolyze γ-glutamyl-containing substrates. These cysteine residues are believed to be essential for the activity of several of these amidases, and their thiol groups appear to function as the nucleophiles in the catalytic mechanisms of all enzymes containing this domain. CHAP domains are often found in association with other domains that cleave peptidoglycan, e.g., acting in a cooperative manner to cleave specialized substrates. See also, Bateman A, et al., Trends Biochem Sci. 2003 May 28(5): 234-7.

### BRIEF DESCRIPTION OF THE FIGURES

[0047] FIG. 1: Schematic of the organization of the F168/08 genome, comprising the nucleic acid sequence of SEQ ID NO:1. The open reading frames (“ORFs”) predicted in the genome are represented by arrows and numbered in black. The direction of an arrow indicates the direction of transcription. Color coding: Black—ORFs for which products a functional assignment could be made based on the known functions of homologous proteins (ORFs encoding products exhibiting homology to the same or similar proteins are indicated using the same number and differentiated by lowercase letter); Gray—ORFs coding for products that are similar to proteins of unknown function; White or Empty—ORFs coding for proteins that share no significant homology with proteins in available databases. Functionally assigned ORFs are also listed in the figure. The information in the figure is also included in tabular form in FIG. 2.

[0048] FIGS. 2A-X: Features of the bacteriophage F168/08 genome, including gene products and assignment of putative functions. The figure includes a listing of the ORFs of the genome and provides for each ORF (i) its position within the genome, (ii) the encoded amino acid sequence, (iii) a listing of homologous proteins and conserved domains within its encoded polypeptide and (iv) an assignment of putative function. ORFs 1-116 listed in FIG. 2 encode the amino acid sequences of SEQ ID NO:8-130, respectively.

[0049] FIGS. 3A-B: The host range of F168/08 as determined by the spot test in 105 Enterococcus faecalis (EFS) (3A) and 56 Enterococcus faecium (EFM) (3B) strains isolated from clinical samples. Each spot contained 5μl bacteriophage suspension with indicated titers (prepared from CsCl purified lysate). Sensitivity of each strain to the phage was evaluated based on a relative scale ranging from turbid (+) to clear (++++) lysis halos. Resistance to phage infection is indicated as (−).

[0050] FIG. 4: Schematic of the organization of the F170/08 genome, comprising the nucleic acid sequence of SEQ ID NO:2. The ORFs predicted in the genome are represented by arrows and numbered in black. The direction of an arrow indicates the direction of transcription. Color coding: Black—ORFs for which products a functional assignment could be made based on the known functions of homologous proteins (ORFs encoding products exhibiting homology to the same or similar proteins are indicated using the same number and differentiated by lowercase letter); Gray—ORFs coding for products that are similar to proteins of unknown function; White or Empty—ORFs coding for proteins that share no significant homology with proteins in available databases. Functionally assigned ORFs are also listed in the figure. The information in the figure is also included in tabular form in FIG. 5.

[0051] FIGS. 5A-AR: Features of the bacteriophage F170/08 genome, including gene products and assignment of putative functions. The figure includes a listing of the ORFs of the genome and provides for each ORF (i) its position within the genome, (ii) the encoded amino acid sequence, (iii) a listing of homologous proteins and conserved domains within its encoded polypeptide and (iv) an assignment of putative function. ORFs 1-213 listed in FIG. 5 encode the amino acid sequences of SEQ ID NO:131-343, respectively.

[0052] FIGS. 6A-B: The host range of F170/08 as determined by the spot test in 105 Enterococcus faecalis (EFS) (6A) and 56 Enterococcus faecium (EFM) (6B) strains isolated from clinical samples. Each spot contained 5 μl bacteriophage suspension with indicated titers (prepared from CsCl purified lysate). Sensitivity of each strain to the phage was evaluated based on a relative scale ranging from turbid (+) to clear (++++) lysis halos. Resistance to phage infection is indicated as (−).

[0053] FIG. 7: Schematic of the organization of the F770/05 genome, comprising the nucleic acid sequence of SEQ ID NO:3. The ORFs predicted in the genome are represented by arrows and numbered in black. The direction of an arrow indicates the direction of transcription. Color coding: Black—ORFs for which products a functional assignment could be made based on the known functions of homologous proteins (ORFs encoding products exhibiting homology to the same or similar proteins are indicated using the same number and differentiated by lowercase letter); Gray—ORFs coding for products that are similar to proteins of unknown function; White or Empty—ORFs coding for proteins that share no significant homology with proteins in available databases. Functionally assigned ORFs are also listed in the figure. The information in the figure is also included in tabular form in FIG. 8.

[0054] FIGS. 8A-AC: Features of the bacteriophage F770/05 genome, including gene products and assignment of putative functions. The figure includes a listing of the ORFs of the genome and provides for each ORF (i) its position within the genome, (ii) the encoded amino acid sequence, (iii) a listing of homologous proteins and conserved domains within its encoded polypeptide and (iv) an assignment of putative function. ORFs 1-95 listed in FIG. 8 encode the amino acid sequences of SEQ ID NO:344-438, respectively.

[0055] FIG. 9: The host range of F770/05 as determined by the spot test in 100 Pseudomonas aeruginosa (PSA) strains isolated from clinical samples. Each spot contained 5 μl bacteriophage suspension with indicated titers (prepared from CsCl purified lysate). Sensitivity of each strain to the phage was evaluated based on a relative scale ranging from turbid (+) to clear (++++) lysis halos. Resistance to phage infection is indicated as (−).

[0056] FIG. 10: Schematic of the organization of the F197/08 genome, comprising the nucleic acid sequence of SEQ ID NO:4. The ORFs predicted in the genome are represented by arrows and numbered in black. The direction of an arrow indicates the direction of transcription. Color coding: Black—ORFs for which products a functional assignment could be made based on the known functions of homologous proteins (ORFs encoding products exhibiting homology to the same or similar proteins are indicated using the same number and differentiated by lowercase letter); Gray—ORFs coding for products that are similar to proteins of unknown function; White or Empty—ORFs coding for proteins that share no significant homology with proteins in available databases. Functionally assigned ORFs are also listed in the figure. The information in the figure is also included in tabular form in FIG. 11.

[0057] FIGS. 11A-AA: Features of the bacteriophage F197/08 genome, including gene products and assignment of putative functions. The figure includes a listing of the ORFs of the genome and provides for each ORF (i) its position within the genome, (ii) the encoded amino acid sequence, (iii) a listing of homologous proteins and conserved domains within its encoded polypeptide and (iv) an assignment of putative function. ORFs 1-66 listed in FIG. 11 encode the amino acid sequences of SEQ ID NO:439-553, respectively.

[0058] FIG. 12: The host range of F197/08 as determined by the spot test in 100 Staphylococcus aureus (STA) strains isolated from clinical samples. Each spot contained 5 μl bacteriophage suspension with indicated titers (prepared from CsCl purified lysate). Sensitivity of each strain to the phage was evaluated based on a relative scale ranging from turbid (+) to clear (++++) lysis halos. Resistance to phage infection is indicated as (−).

[0059] FIG. 13: Schematic of the organization of the F86/06 genome, comprising the nucleic acid sequence of SEQ ID NO:5. The ORFs predicted in the genome are represented by arrows and numbered in black. The direction of an arrow indicates the direction of transcription. Color coding: Black—ORFs for which products a functional assignment could be made based on the known functions of homologous proteins (ORFs encoding products exhibiting homology to the same or similar proteins are indicated using the same number and differentiated by lowercase letter); Gray—ORFs coding for products that are similar to proteins of unknown function; White or Empty—ORFs coding for proteins that share no significant homology with proteins in available databases. Functionally assigned ORFs are also listed in the figure. The information in the figure is also included in tabular form in FIG. 14.

[0060] FIGS. 14A-S: Features of the bacteriophage F86/06 genome, including gene products and assignment of putative functions. The figure includes a listing of the ORFs of the genome and provides for each ORF (i) its position within the genome, (ii) the encoded amino acid sequence, (iii) a listing of homologous proteins and conserved domains within its encoded polypeptide and (iv) an assignment of putative function. ORFs 1-63 listed in FIG. 14 encode the amino acid sequences of SEQ ID NO:554-616, respectively.

[0061] FIG. 15: The host range of F86/06 as determined by the spot test in 100 Staphylococcus aureus (STA) strains isolated from clinical samples. Each spot contained 5 μl bacteriophage suspension with indicated titers (prepared from CsCl purified lysate). Sensitivity of each strain to the phage was evaluated based on a relative scale ranging from turbid (+) to clear (++++) lysis halos. Resistance to phage infection is indicated as (−).

[0062] FIG. 16: Schematic of the organization of the F87s/06 genome, comprising the nucleic acid sequence of SEQ ID NO:6. The ORFs predicted in the genome are represented by arrows and numbered in black. The direction of an arrow indicates the direction of transcription. Color coding: Black—ORFs for which products a functional assignment could be made based on the known functions of homologous proteins (ORFs encoding products exhibiting homology to the same or similar proteins are indicated using the same number and differentiated by lowercase letter); Gray—ORFs coding for products that are similar to proteins of unknown function; White or Empty—ORFs coding for proteins that share no significant homology with proteins in available databases. Functionally assigned ORFs are also listed in the figure. The information in the figure is also included in tabular form in FIG. 17.

[0063] FIGS. 17A-U: Features of the bacteriophage F87s/06 genome, including gene products and assignment of putative functions. The figure includes a listing of the ORFs of the genome and provides for each ORF (i) its position within the genome, (ii) the encoded amino acid sequence, (iii) a listing of homologous proteins and conserved domains within its encoded polypeptide and (iv) an assignment of putative function. ORFs 1-61 listed in FIG. 17 encode the amino acid sequences of SEQ ID NO:617-681, respectively.

[0064] FIG. 18: The host range of F87s/06 as determined by the spot test in 100 Staphylococcus aureus (STA) strains isolated from clinical samples. Each spot contained 5 μl bacteriophage suspension with indicated titers (prepared from CsCl purified lysate). Sensitivity of each strain to the phage was evaluated based on a relative scale ranging from turbid (+) to clear (++++) lysis halos. Resistance to phage infection is indicated as (−).

[0065] FIG. 19: Schematic of the organization of the F91a/06 genome, comprising the nucleic acid sequence of SEQ ID NO:7. The ORFs predicted in the genome are represented by arrows and numbered in black. The direction of an arrow indicates the direction of transcription. Color coding: Black—ORFs for which products a functional assignment could be made based on the known functions of homologous proteins (ORFs encoding products exhibiting homology to the same or similar proteins are indicated using the same number and differentiated by lowercase letter); Gray—ORFs coding for products that are similar to proteins of unknown function; White or Empty—ORFs coding for proteins that share no significant homology with proteins in available databases. Functionally assigned ORFs are also listed in the figure. The information in the figure is also included in tabular form in FIG. 20.

[0066] FIGS. 20A-U: Features of the bacteriophage F91a/06 genome, including gene products and assignment of putative functions. The figure includes a listing of the ORFs of the genome and provides for each ORF (i) its position within the genome, (ii) the encoded amino acid sequence, (iii) a listing of homologous proteins and conserved domains within its encoded polypeptide and (iv) an assignment of putative function. ORFs 1-64 listed in FIG. 20 encode the amino acid sequences of SEQ ID NO:682-754, respectively.

[0067] FIG. 21: The host range of F91a/06 as determined by the spot test in 100 Staphylococcus aureus (STA) strains isolated from clinical samples. Each spot contained 5 μl bacteriophage suspension with indicated titers (prepared from CsCl purified lysate). Sensitivity of each strain to the phage was evaluated based on a relative scale ranging from turbid (+) to clear (++++) lysis halos. Resistance to phage infection is indicated as (−).

[0068] FIG. 22: Schematic organization of the F1245/05 genome, comprising the nucleic acid sequence of SEQ ID NO:760. The ORFs predicted in the 43kb genome are represented by arrows and numbered in black. For the ORFs functionally assigned, the number is substituted by the predicted function. The direction of an arrow indicates the direction of transcription. Color coding: Black—ORFs for whose products a functional assignment could be made based on homologous proteins; Gray—ORFs coding for products that are similar to proteins of unknown function; Striped—ORFs with an assigned function based on its relative genome position and on the presence of putative transmembrane domains in the encoded product; Empty arrows—ORFs coding for proteins that share no significant homology with proteins in databases.

[0069] FIGS. 23A-I: Features of bacteriophage F1245/05 genome, including gene products and assignment of putative functions are provided.

[0070] FIGS. 24A-E: The host range of F1245/05 as determined by the spot test in 100 Acinetobacter baumannii strains isolated from clinical samples is provided. Each spot contained 5 μl bacteriophage suspensions with indicated titers (prepared from CsCI purified lysate). Sensitivity to the phage is presented as a scale ranging from turbid (+) to clear (++++) lysis halos. Resistance to phage infection is indicated as (−).

### DETAILED DESCRIPTION

[0071] The present invention is directed to isolated bacteriophages, and their isolated polypeptide products, having antibacterial activity against one or more species or strains of the nosocomial pathogens A. baumannii, E. faecalis, E. faecium, P. aeruginosa and S. aureus. In one embodiment, isolated bacteriophages or polypeptides are provided that exhibit antimicrobial and/or antibacterial activity against methicillin resistant strains of S. aureus (MRSA). In addition, the bacteriophages and polypeptides of the invention may exhibit antibacterial or antimicrobial activity against one or more species or strains of pathogenic bacteria including, but not limited to, S. epidermidis, S. auricularis, S. capitis, S. haemolyticus, S. hominis, S. saprophyticus, S. simulans, S. xylosis, Micrococcus luteus, Bacilus subtilis, B. pumilus, E. hirae and E. avium.

[0072] In one embodiment, the invention provides a bacteriophage having a genome comprising or consisting of the nucleic acid sequence of SEQ ID NO:1. A specific example in accordance with this embodiment is the isolated bacteriophage F168/08, which targets a number of strains of E. faecalis and E. faecium. Open reading frames (ORFs) in the F168/08 genome, the amino acid sequences encoded by the ORFs and the assignment of putative functions of the encoded amino acid sequences (i.e., encoded proteins and/or polypeptides) are provided in FIG. 2 (also providing the amino acid sequences SEQ ID NOS:8-130).

[0073] Enterococci are gram-positive, spherical bacteria that form colonies in groups or chains. They are found as part of the digestive tract flora in many mammals, including humans. Enterococcus infections account for 12% of all nosocomial infections. An Enterococcus infection can cause complicated abdominal infections, skin and skin structure infections, urinary tract infections and infections of the blood stream, which can be difficult to treat, particularly in cases where the strain involved has developed resistance to several antibiotics. In such instances, infection can be life threatening, especially where the patient is already immunodeficient.

[0074] Enterococcus faecalis accounts for the majority of Enterococci infections and is a Gram-positive commensal bacterium inhabiting the gastrointestinal tracts of humans and other mammals. It is non-motile and facultatively anaerobic. E. faecalis can cause endocarditis, as well as bladder, prostate, and epididymal infections, including life threatening infections in humans, especially in the nosocomial environment. E. faecalis is resistant to many commonly used antimicrobial agents (such as, e.g., aminoglycosides, aztreonam, cephalosporins, clindamycin, the semi-synthetic penicillins nafcillin and oxacillin, trimethoprim-sulfamethoxazole, and the like).

[0075] Enterococcus faecium is known to have a resistance to several types of antibiotics including quinolones and aminoglycosides. Vancomycin-resistant strains of E. faecium are also known. Resistance to several antibiotics and tolerance for adverse conditions makes E. faecium a major concern for the medical community, which has dubbed this microbe a “supergerm”. In another embodiment, the invention provides a bacteriophage having a genome comprising or consisting of the nucleic acid sequence of SEQ ID NO:2. A specific example in accordance with this embodiment is the isolated bacteriophage F170/08, which targets a number of strains of E. faecalis and E. faecium. Open reading frames (ORFs) in the F178/08 genome, the amino acid sequences encoded by the ORFs and the assignment of putative functions of the encoded amino acid sequences (i.e., encoded proteins and/or polypeptides) are provided in FIG. 5 (also providing the amino acid sequences SEQ ID NOS:131-343).

[0076] In still another embodiment, the invention provides a bacteriophage having a genome comprising or consisting of the nucleic acid sequence of SEQ ID NO:3. A specific example in accordance with this embodiment is the isolated bacteriophage F770/05, which targets a number of strains of P. aeruginosa. Open reading frames (ORFs) in the F770/05 genome, the amino acid sequences encoded by the ORFs and the assignment of putative functions of the encoded amino acid sequences (i.e., encoded proteins and/or polypeptides) are provided in FIG. 8 (also providing the amino acid sequences SEQ ID NOS:344-438).

[0077] Pseudomonas aeruginosa is a common Gram-negative rod-shaped bacterium found in soil, water, skin flora and most man-made environments. It thrives not only in normal atmospheres, but also with little oxygen as a facultative anaerobe, and can infect damaged tissues or immunocomromised inidviduals. When such colonisations occur in critical body organs such as the lungs, the urinary tract, and kidneys, the results can be fatal. Because it thrives on surfaces, this bacterium is also found on and in medical equipment including catheters, causing cross infections in hospitals and clinics. P. aeruginosa is one of the most relevant opportunistic, nosocomial pathogens, and it has been estimated that one in ten hosptical-acquired infections are from Pseudomonas. P. aeruginosa is also the most common cause of burn injury infections and the most frequent colonizer of medical devices, such as catheters.

[0078] In yet another embodiment, the invention provides a bacteriophage having a genome comprising or consisting of the nucleic acid sequence of SEQ ID NO:4. A specific example in accordance with this embodiment is the isolated bacteriophage F197/08, which targets a number of strains of S. aureus. Open reading frames (ORFs) in the F197/08 genome, the amino acid sequences encoded by the ORFs and the assignment of putative functions of the encoded amino acid sequences (i.e., encoded proteins and/or polypeptides) are provided in FIG. 11 (also providing the amino acid sequences SEQ ID NOS:439-553).

[0079] In yet another embodiment, the invention provides a bacteriophage having a genome comprising or consisting of the nucleic acid sequence of SEQ ID NO:5. A specific example in accordance with this embodiment is the isolated bacteriophage F86/06, which targets a number of strains of S. aureus. Open reading frames (ORFs) in the F86/06 genome, the amino acid sequences encoded by the ORFs and the assignment of putative functions of the encoded amino acid sequences (i.e., encoded proteins and/or polypeptides) are provided in FIG. 14 (also providing the amino acid sequences SEQ ID NOS:554-616).

[0080] In yet another embodiment, the invention provides a bacteriophage having a genome comprising or consisting of the nucleic acid sequence of SEQ ID NO:6. A specific example in accordance with this embodiment is the isolated bacteriophage F87s/06, which targets a number of strains of S. aureus. Open reading frames (ORFs) in the F87s/06 genome, the amino acid sequences encoded by the ORFs and the assignment of putative functions of the encoded amino acid sequences (i.e., encoded proteins and/or polypeptides) are provided in FIG. 17 (also providing the amino acid sequences SEQ ID NOS:617-681).

[0081] In still another embodiment, the invention provides a bacteriophage having a genome comprising or consisting of the nucleic acid sequence of SEQ ID NO:7. A specific example in accordance with this embodiment is the isolated bacteriophage F91 a/06, which targets a number of strains of S. aureus. Open reading frames (ORFs) in the F91a/06 genome, the amino acid sequences encoded by the ORFs and the assignment of putative functions of the encoded amino acid sequences (i.e., encoded proteins and/or polypeptides) are provided in FIG. 20 (also providing the amino acid sequences SEQ ID NOS:682-754).

[0082] S. aureus is a spherical, facultatively-anaerobic, Gram-positive bacterium, often part of the skin flora found in the nose and on skin. S. aureus can cause a range of illnesses from minor skin infections, such as pimples, to gastroenteritis, to life-threatening diseases such as pneumonia, meningitis, osteomyelitis, endocarditis, toxic shock syndrome (TSS), bacteremia, and sepsis. It is one of the five most common causes of nosocomial infections, and often the cause of postsurgical wound infections. Today, S. aureus has become resistant to many commonly used antibiotics, and it has been estimated that only 2% of all S. aureus isolates are sensitive to penicillin. Second-generation penicillins, such s methicillin, oxacillin, cloxacillin and flucloxacillin, were developed to treat penicillin-resistant S. aureus. Methicillin was the first antibiotic in this class to be used, but only two years later, the first case of methicillin-resistant S. aureus (MRSA) was reported. Since the 1990s, there has been an explosion in MRSA prevalence in hospitals, where it is now considered an endemic.

[0083] In still another embodiment, the invention provides a bacteriophage having a genome comprising or consisting of the nucleic acid sequence of SEQ ID NO:760. A specific example in accordance with this embodiment is the isolated bacteriophage F1245/05, which targets a number of strains of A. baumannii. Open reading frames (ORFs) in the F1245/05 genome, the amino acid sequences encoded by the ORFs and the assignment of putative functions of the encoded amino acid sequences (i.e., encoded proteins and/or polypeptides) are provided in FIG. 23 (also providing the amino acid sequences SEQ ID NOS:761-816).

[0084] Acinetobacter baumannii is a species of bacteria that causes a number of severe clinical infections, particularly in individuals with compromised immune systems. Acinetobacter baumannii is a pleomorphic aerobic gram-negative bacillus that is commonly isolated from the hospital environment and from hospitalized patients. The bacterium often enters the body open wounds, catheters, or breathing tubes. Acinetobacter baumannii usually colonizes aquatic environments and is often cultured from hospitalized patients' sputum or respiratory secretions, wounds, and urine. In a hospital setting, Acinetobacter baumannii commonly colonizes irrigating solutions and intravenous solutions. It is also known to be resistant to multiple antibiotics and the number of nosocomial infections caused by A. baumanni has increased in recent years.

[0085] In certain embodiments, the bacteriophage of the invention comprises or consists of a genome having a sequence identity of at least 85%, 90%, 95%, 96%, 97%, 98% or at least 99% with the nucleic acid sequence of SEQ ID NO:1, SEQ ID NO:2, SEQ ID NO:3, SEQ ID NO:4, SEQ ID NO:5, SEQ ID NO:6, SEQ ID NO:7, or SEQ ID NO:760, which bacteriophage exhibits at least one biological, e.g., antimicrobial or antibacterial activity (e.g., lytic killing activity), of one or more of bacteriophage F168/08, F170/08, F770/05, F197/08, F86/06, F87s/06, F91a/06 and F1245/05. Alternatively or in addition, the bacteriophage of the invention may have a genome comprising a functional fragment of the nucleic acid sequence of SEQ ID NO:1, SEQ ID NO:2, SEQ ID NO:3, SEQ ID NO:4, SEQ ID NO:5, SEQ ID NO:6, SEQ ID NO:7, or SEQ ID NO:760, including the sequences of any of the open reading frames described in FIGS. 2, 5, 8, 11, 14, 17, 20, and 23.

[0086] The invention also provides for isolated bacteria infected with one or more of the bacteriophages of the invention. In certain embodiments, the invention provides isolated E. faecalis or E. faecium infected with a bacteriophage having a genome comprising or consisting of the nucleic acid sequence of SEQ ID NO:1 and/or SEQ ID NO:2. In other embodiments, the invention provides isolated P. aeruginosa infected with a bacteriophage having a genome comprising or consisting of the nucleic acid sequence of SEQ ID NO:3. In still other embodiments, the invention provides isolated S. aureus infected with a bacteriophage having a genome comprising or consisting of the nucleic acid sequence of SEQ ID NO:4, SEQ ID NO:5, SEQ ID NO:6 and/or SEQ ID NO:7. In yet still other embodiments, the invention provides isolated A. baumannii infected with a bacteriophage having a genome comprising or consisting of the nucleic acid sequence of SEQ ID NO:760.

[0087] The invention provides for methods of production and isolation of a bacteriophage having a genome comprising or consisting of the nucleic acid sequence of SEQ ID NO:1, SEQ ID NO:2, SEQ ID NO:3, SEQ ID NO:4, SEQ ID NO:5, SEQ ID NO:6, SEQ ID NO:7, or SEQ ID NO:760. In certain embodiments, the invention provides for a method of producing and/or isolating a bacteriophage having a genome that comprises or consists of the nucleic acid sequence of SEQ ID NO:1 or SEQ ID NO:2 comprising (i) obtaining a culture of E. faecalis or E. faecium, (ii) infecting it with the bacteriophage having a genome comprising or consisting of the nucleic acid sequence of SEQ ID NO:1 or SEQ ID NO:2; (iii) culturing until significant lysis of the culture is observed and (iv) isolating from the culture the bacteriophage. In other embodiments, the invention provides for a method of producing and/or isolating a bacteriophage having a genome that comprises or consists of the nucleic acid sequence of SEQ ID NO:3 comprising (i) obtaining a culture of P. aeruginosa, (ii) infecting it with the bacteriophage having a genome comprising or consisting of the nucleic acid sequence of SEQ ID NO:3; (iii) culturing until significant lysis of the culture is observed and (iv) isolating from the culture the bacteriophage. In still other embodiments, the invention provides for a method of producing and/or isolating a bacteriophage having a genome that comprises or consists of the nucleic acid sequence of SEQ ID NO:4, SEQ ID NO:5, SEQ ID NO:6 or SEQ ID NO:7 comprising (i) obtaining a culture of S. aureus, (ii) infecting it with the bacteriophage having a genome comprising or consisting of the nucleic acid sequence of ID NO:4, SEQ ID NO:5, SEQ ID NO:6 or SEQ ID NO:7; (iii) culturing until significant lysis of the culture is observed and (iv) isolating from the culture the bacteriophage. In yet still other embodiments, the invention provides for a method of producing and/or isolating a bacteriophage having a genome that comprises or consists of the nucleic acid sequence of SEQ ID NO:760 comprising (i) obtaining a culture of A. baumannii, (ii) infecting it with the bacteriophage having a genome comprising or consisting of the nucleic acid sequence of SEQ ID NO:760; (iii) culturing until significant lysis of the culture is observed and (iv) isolating from the culture the bacteriophage.

[0088] Bacteriophage may be isolated from a bacterial sample using any method described herein or known in the art (see, e.g., Carlson, “Working with bacteriophages: common techniques and methodological approaches,” In, Kutter and Sulakvelidze (Eds) Bacteriophages: Biology and Applications, 5^{th} ed. CRC Press (2005); incorporated herein by reference in its entirety).

[0089] The invention also provides for polypeptides isolated from bacteriophages of the invention. The isolated polypeptides may be full length bacteriophage proteins or may be fragments, variants or derivatives of the bacteriophage proteins provided that the fragment, variant or derivative exhibit at least one biological activity associated with the bacteriophage or polypeptide from which it is derived. In certain embodiments, the polypeptides of the invention are isolated from bacteriophage F1245/05 (which typically infects A. baumannii), F168/08 or F170/08 (which typically infects E. faecalis and/or E. faecium), bacteriophage F770/05 (which typically infects P. aeruginosa) or bacteriophage F197/08, F86/06, F87s/06 or F91 a/06 (which typically infect S. aureus).

[0090] In specific embodiments, the polypeptide of the invention is an endolysin or lysin isolated from a bacteriophage having a genome comprising or consisting of SEQ ID NO:1, SEQ ID NO:2, SEQ ID NO:4, SEQ ID NO:5, SEQ ID NO:6, SEQ ID NO:7, or SEQ ID NO:760 (e.g., bacteriophage F168/08, F170/08, F197/08, F86/06, F87s/06, F91a/06, or F1245/05 respectively). In specific embodiments, the polypeptide of the invention is an endolysin or lysin having the amino acid sequence comprising or consisting of SEQ ID NO:797, SEQ ID NO:68, SEQ ID NO:184, SEQ ID NO:202, SEQ ID NO:203, SEQ ID NO:446, SEQ ID NO:447, SEQ ID NO:448, SEQ ID NO:575, SEQ ID NO:641 or SEQ ID NO:712. In other embodiments, the isolated polypeptide of the invention is a fragment, variant or derivative of an endolysin or lysin isolated from a bacteriophage of the invention, which fragment, variant or derivative exhibits at least one biological activity, preferably antibacterial activity (e.g., lytic killing activity), of the endolysin, lysin or bacteriophage from which it is isolated or derived. Accordingly, in certain embodiments, the invention provides isolated polypeptides that are fragments, variants or derivatives of endolysins or lysins isolated from bacteriophages of the invention, which fragments, variants or derivatives exhibit antibacterial or antimicrobial activity (e.g., lytic killing activity) against one or more of A. baumannii, E. faecalis, E. faecium or S. aureus. In other embodiments, the isolated polypeptides that are fragments, variants or derivatives of endolysins or lysins isolated from bacteriophages of the invention that exhibit antibacterial or antimicrobial activity (e.g., lytic killing activity) against one or more species of bacteria other than A. baumannii, E. faecalis, E. faecium or S. aureus (e.g., P. aeruginosa). In certain embodiments, the polypeptide of the invention comprises or consists of the amino acid sequence SEQ ID NO:68, SEQ ID NO:184, SEQ ID NO:202 or SEQ ID NO:203, or a fragment, variant or derivative thereof, which polypeptide exhibits antibacterial or antimicrobial activity against E. faecalis or E. faecium. In other embodiments, the polypeptide of the invention comprises or consists of the amino acid sequence SEQ ID NO:446, SEQ ID NO:447, SEQ ID NO:448, SEQ ID NO:575, SEQ ID NO:641 or SEQ ID NO:712, or a fragment, variant or derivative thereof, which polypeptide exhibits antibacterial or antimicrobial activity against S. aureus. In yet still other embodiments, the polypeptide of the invention comprises or consists of the amino acid sequence SEQ ID NO:797, or a fragment, variant or derivative thereof, which polypeptide exhibits antibacterial or antimicrobial activity against A. baumanni.

[0091] In certain embodiments, the polypeptide of the invention comprises or consists of a CHAP domain isolated from an endolysin or lysin of bacteriophage F168/08, F170/08, F770/05, F197/08, F86/06, F87s/06 or F91a/06. Isolated CHAP domains have been demonstrated to retain the antibacterial activity, e.g., lytic killing activity, of the endolysin or lysin from which they are derived; CHAP domains may be identified and isolated by methods routine in the art (see, e.g., Rigden et al., 2003, Trends Biochem. Sci. 28:230-234; Bateman et al., 2003, Trends Biochem. Sci. 28:234-237, each of which is incorporated by reference herein in its entirety). In specific embodiments, the polypeptide of the invention comprises or consists of a CHAP domain isolated from a polypeptide having an amino acid sequence of SEQ ID NO:68, SEQ ID NO:184, SEQ ID NO:202, SEQ ID NO:203, SEQ ID NO:446, SEQ ID NO:447, SEQ ID NO:448, SEQ ID NO:575, SEQ ID NO:641 or SEQ ID NO:712. In specific embodiments, the invention provides for an isolated polypeptide that comprises or consists of the CHAP domain derived from a second polypeptide having the amino acid sequence of SEQ ID NO:68, SEQ ID NO:446, SEQ ID NO:575, SEQ ID NO:641 or SEQ ID NO:712, wherein the CHAP domain has the amino acid sequence of SEQ ID NO:755, SEQ ID NO:756, SEQ ID NO:757, SEQ ID NO:758 or SEQ ID NO:759, respectively. That is, SEQ ID NO:755 corresponds to a CHAP domain derived from the polypeptide having amino acid sequence of SEQ ID NO:68; SEQ ID NO:756 corresponds to a CHAP domain derived from the polypeptide having amino acid sequence of SEQ ID NO:446, and so forth. In other embodiments the invention provides for a fragment, variant or derivative of a CHAP domain of isolated from an endolysin or lysin of bacteriophage F168/08, F170/08, F770/05, F197/08, F86/06, F87s/06 or F91a/06, which fragment, variant or derivative exhibits at least one biological activity, e.g., lytic cell killing, of the CHAP domain from which it was derived and wherein said CHAP domain has an amino acid sequence of SEQ ID NO:755, SEQ ID NO:756, SEQ ID NO:757, SEQ ID NO:758 or SEQ ID NO:759. The amino acid sequences of SEQ ID NO:755-SEQ ID NO:759 are provided in Table 1.

TABLE 1
Amino acid sequences of CHAP domains isolated from
bacteriophages of the invention

| SEQ ID | | |
|---|---|---|
| NO | Sequence | Phage |
| 755 | NGLVGKGVDADGWYGTQCMDLTVDVMQRFFGWRPYGNAIALV | F168/08 |
| | DQPIPAGFQRIRTTSSTQIKAGDVMIWGLGYYAQYGHTGIATEDG | |
| | RADGTFVSVDQNWINPSLEVGSPAAAIHHNMDGVWGVIR | |
| 756 | DNSLGKQFNPDLFYGFQCYDYANMFFMIATGERLQGLYAYNIPF | F197/08 |
| | DNKARIEKYGQIIKNYDSFLPQKLDIVVFPSKYGGGAGHVEIVESA | |
| | NLNTFTSYGQNWNGKGWTNGVAQPGWGPETVTRHVHYYDDPM | |
| | YFIR | |
| 757 | RWYQGRYIDFDGWYGYQCADLAVDYIYWLLEIRMWGNAKDAI | F86/06 |
| | NNDFKNMATVYENTPSFVPQIGDVAVFTKGIYKQYGHIGLVFNG | |
| | GNTNQFLILEQNYDGNANTPAKLRWDNYYGCTHFIR | |
| 758 | RWYQGRYIDFDGWYGYQCADLAVDYIYWLLEIRMWGNAKDAI | F87s/06 |
| | NNDFKNMATVYENTPSFVPQIGDVAVFTKGIYKQYGHIGLVFNG | |
| | GNTNQFLILEQNYDGNANTPAKLRWDNYYGCTHFIR | |
| 759 | RWYQGRYIDFDGWYGYQCADLAVDYIYWLLEIRMWGNAKDAI | F91a/06 |
| | NNDFKNMATVYENTPSFVPQIGDVAVFTKGIYKQYGHIGLVFNG | |
| | GNTNQFLILEQNYDGNANTPAKLRWDNYYGCTHFIR | |

[0092] In certain embodiments, a polypeptide of the invention comprises or consists of a tail length tape measure protein or tail protein (e.g., tail component, tail fiber protein, adsorption associated tail protein), or fragment thereof, isolated from a bacteriophage having a genome comprising or consisting of SEQ ID NO:1, SEQ ID NO:2, SEQ ID NO:3, SEQ ID NO:4, SEQ ID NO:5, SEQ ID NO:6, SEQ ID NO:7, or SEQ ID NO:760 (e.g., bacteriophage F168/08, F170/08, F770/05, F197/08, F86/06, F87s/06, F91a/06, or F1245/05, respectively), wherein the tail length tape measure protein or tail protein, or fragment thereof has a biologic function associated with the bacteriophage from which it is derived, e.g., antimicrobial or antibacterial activity (e.g., lytic killing activity). In specific embodiments, the antimicrobial or antibacterial activity of the tail length tape measure protein or tail protein is directed against at least one or more species or strains of A. baumannii, E. faecalis, E. faecium, P. aeruginosa and/or S. aureus. In specific embodiments, the polypeptide of the invention is a tail tape measure protein or tail protein having the amino acid sequence comprising or consisting of SEQ ID NO:61, SEQ ID NO:63, SEQ ID NO:204, SEQ ID NO:214, SEQ ID NO:435, SEQ ID NO:438, SEQ ID NO:440, SEQ ID NO:525, SEQ ID NO:526, SEQ ID NO:527, SEQ ID NO:528, SEQ ID NO:529, SEQ ID NO:530, SEQ ID NO:531, SEQ ID NO:532, SEQ ID NO:533, SEQ ID NO:534, SEQ ID NO:535, SEQ ID NO:536, SEQ ID NO:537, SEQ ID NO:538, SEQ ID NO:539, SEQ ID NO:567, SEQ ID NO:568, SEQ ID NO:632, SEQ ID NO:633, SEQ ID NO:700, SEQ ID NO:701, SEQ ID NO:702, SEQ ID NO:703, SEQ ID NO:704, or SEQ ID NO:795. In other embodiments, the isolated polypeptide of the invention is a fragment, variant or derivative of the amino acid sequence of SEQ ID NO:61, SEQ ID NO:63, SEQ ID NO:204, SEQ ID NO:214, SEQ ID NO:435, SEQ ID NO:438, SEQ ID NO:440, SEQ ID NO:525, SEQ ID NO:526, SEQ ID NO:527, SEQ ID NO:528, SEQ ID NO:529, SEQ ID NO:530, SEQ ID NO:531, SEQ ID NO:532, SEQ ID NO:533, SEQ ID NO:534, SEQ ID NO:535, SEQ ID NO:536, SEQ ID NO:537, SEQ ID NO:538, SEQ ID NO:539, SEQ ID NO:567, SEQ ID NO:568, SEQ ID NO:632, SEQ ID NO:633, SEQ ID NO:700, SEQ ID NO:701, SEQ ID NO:702, SEQ ID NO:703, SEQ ID NO:704, or SEQ ID NO:795, which fragment variant or derivative exhibits at least one biological activity or function of the bacteriophage from which it is isolated or derived, e.g., antimicrobial or antibacterial activity (e.g., lytic killing activity). In preferred embodiments, the at least one biological activity or function of the fragment, variant or derivative is directed against one or more strains of E. faecalis, E. faecium, P. aeruginosa, S. aureus, and/or A. baumannii.

[0093] In certain embodiments, the isolated polypeptide of the invention is a variant of a bacteriophage polypeptide, which variant comprises or consists of a amino acid sequence having at least 60%, 65%, 70%, 75%, 80%, 85%, 86%, 87%, 88%, 89%, 90%, 91%, 92%, 93%, 94%, 95%, 96%, 97%, 98%, 99%, or greater sequence identity to a second amino acid sequence of the same length (i.e., consisting of the same number of residues), which second amino acid sequence is SEQ ID NO:61, SEQ ID NO:63, SEQ ID NO:68, SEQ ID NO:184, SEQ ID NO:202, SEQ ID NO:203, SEQ ID NO:204, SEQ ID NO:214, SEQ ID NO:435, SEQ ID NO:438, SEQ ID NO:440, SEQ ID NO:446, SEQ ID NO:447, SEQ ID NO:448, SEQ ID NO:525, SEQ ID NO:526, SEQ ID NO:527, SEQ ID NO:528, SEQ ID NO:529, SEQ ID NO:530, SEQ ID NO:531, SEQ ID NO:532, SEQ ID NO:533, SEQ ID NO:534, SEQ ID NO:535, SEQ ID NO:536, SEQ ID NO:537, SEQ ID NO:538, SEQ ID NO:539, SEQ ID NO:567, SEQ ID NO:568, SEQ ID NO:575, SEQ ID NO:632, SEQ ID NO:633, SEQ ID NO:641, SEQ ID NO:700, SEQ ID NO:701, SEQ ID NO:702, SEQ ID NO:703, SEQ ID NO:704, SEQ ID NO:712, SEQ ID NO:755, SEQ ID NO:756, SEQ ID NO:757, SEQ ID NO:758, SEQ ID NO:759, SEQ ID NO:795, or SEQ ID NO:797, and/or a fragment thereof, and wherein the variant exhibits at least one biological function or activity of the bacteriophage from which it was derived (e.g., antimicrobial or antibacterial activity (e.g., lytic killing activity)) against one or more strains of bacteria (e.g., Gram-positive bacteria (e.g., E. faecalis, E. faecium, S. aureus), Gram-negative bacteria (e.g., P. aeruginosa, A baumannii) or bacteria not classified as either Gram-positive or Gram-negative).

[0094] In certain embodiments, the invention provides an isolated polypeptide having an amino acid sequence of any of SEQ ID NOS:2-124, SEQ ID NOS: 126-338, SEQ ID NOS:340-434, SEQ ID NOS:436-550, SEQ ID NOS:552-614, SEQ ID NOS:616-680, SEQ ID NOS:682-759, SEQ ID NOS:761-816, and active biologic fragments thereof. In preferred embodiments, the variant polypeptide of the invention exhibits at least one biologic activity associated with the polypeptide or bacteriophage from which it was isolated or derived directed against at least one or more strains of E. faecalis, E. faecium, P. aeruginosa, S. aureus, and/or A. baumannii.

[0095] In other embodiments, the invention provides an isolated nucleic acid sequence encoding the amino acid sequence of one of SEQ ID NOS:8-130, SEQ ID NOS:131-343, SEQ ID NOS:344-438, SEQ ID NOS:439-553, SEQ ID NOS:554-616, SEQ ID NOS:617-681, SEQ ID NOS:682-759, SEQ ID NOS:761-816, and active fragments thereof. In other embodiments the invention provides the nucleic acid sequence of any of the open reading frames identified in FIGS. 2, 5, 8, 11, 14, 17, 20, and 23.

[0096] In certain embodiments, the polypeptides of the present invention are recombinantly fused or chemically conjugated (including both covalently and non-covalently conjugations) to therapeutic agents, e.g., heterologous polypeptides or small molecules, to generate fusion proteins or chimeric polypeptides. The fusion does not necessarily need to be direct, but may occur through linker sequences or through chemical conjugation. Non-limiting examples of therapeutic agents to which the polypeptides of the invention may be conjugated are peptide or non-peptide cytotoxins (including antimicrobials and/or antibiotics), tracer/marker molecules (e.g., radionuclides and fluorphores) and other antibiotic or antibacterial compounds known in the art.

### 6.1 Antibiotic Compositions

[0097] The isolated bacteriophages or polypeptides of the present invention may be administered alone or incorporated into a pharmaceutical composition for the use in treatment or prophylaxis of bacterial infections, e.g., infections caused by bacteria including, but not limited to, A. baumannii, E. faecalis, E, faecium, P. aeruginosa and S. aureus. The polypeptides may be combined with a pharmaceutically acceptable carrier, excipient, or stabilizer. Examples of pharmaceutically acceptable carriers, excipients and stabilizers include, but are not limited to, buffers such as phosphate, citrate, and other organic acids; antioxidants including ascorbic acid; low molecular weight polypeptides; proteins, such as serum albumin and gelatin; hydrophilic polymers such as polyvinylpyrrolidone; amino acids such as glycine, glutamine, asparagine, arginine or lysine; monosaccharides, disaccharides, and other carbohydrates including glucose, mannose, or dextrins; chelating agents such as EDTA; sugar alcohols such as mannitol or sorbitol; salt-forming counterions such as sodium; and/or nonionic surfactants such as TWEEN™, polyethylene glycol (PEG), and PLURONICS™. The pharmaceutical composition of the present invention (e.g., antibacterial composition) can also include a lubricant, a wetting agent, a sweetener, a flavoring agent, an emulsifier, a suspending agent, and a preservative, in addition to the above ingredients.

[0098] The bacteriophages and/or polypeptides of the present invention may also be combined with one or more therapeutic and or prophylactic agents useful for the treatment of bacterial infection as described herein and/or known in the art (e.g. one or more lysins). The pharmaceutical compositions of the invention may therefore comprise two or more isolated bacteriophages of the invention (with antibacterial activity against the same or different bacterial species or strains), the combination of a bacteriophage and a polypeptide of the invention or the combination of a bacteriophage and/or polypeptide of the invention and a bacteriophage and/or therapeutic polypeptide known in the art. In specific embodiments, the therapeutic components of a combination target two or more species or strains of bacteria or exhibit differing enzymatic activity. For example, lysins, in general, exhibit one of amidase, endopeptidase, muramidase or glucosamidase activity. Accordingly, the combination of lysins exhibiting different activities may provide synergistic enhancement to the therapeutic activity of the pharmaceutical composition of the invention.

[0099] Examples of other therapeutic agents that may be used in combination with the polypeptide of the invention include, but are not limited to, standard antibiotic agents, anti-inflammatory agents, antiviral agents, local anesthetic agents, and corticosteroids.

[0100] Standard antibiotics that maybe used with pharmaceutical compositions comprising polypeptides of the invention include, but are not limited to, amikacin, gentamicin, kanamycin, neomycin, netilmicin, paromomycin, rhodostreptomycin, streptomycin, tobramycin, apramycin, rifamycin, naphthomycin, mupirocin, geldanamycin, ansamitocin, carbacephems, imipenem, meropenem, ertapenem, faropenem, doripenem, panipenem/betamipron, biapenem, PZ-601, cephalosporins, cefacetrile, cefadroxil, cefalexin, cefaloglycin, cefalonium, cefaloridine, cefalotin, cefapirin, cefatrizine, cefazaflur, cefazedone, cefazolin, cefradine, cefroxadine, ceftezole, cefaclor, cefonicid, cefprozil, cefuroxime, cefuzonam, cefinetazole, cefotetan, cefoxitin, cefcapene, cefdaloxime, cefdinir, cefditoren, cefetamet, cefixime, cefmenoxime, cefteram, ceftibuten, ceftiofur, ceftiolene, ceftizoxime, ceftriaxone, cefoperazone, ceftazidime latamoxef, cefclidine, cefepime, cefluprenam, cefoselis, cefozopran, cefpirome, cefquinome, flomoxef. ceftobiprole, azithromycin, clarithromycin, dirithromycin, erythromycin, roxithromycin, aztreonam, pencillin and penicillin derivatives, actinomycin, bacitracin, colistin, polymyxin B, cinoxacin, flumequine, nalidixic acid, oxolinic acid, piromidic acide, pipemidic acid, rosoxacin, ciprofloxacin, enoxacin, fleroxacin, lomefloxacin, nadifloxacin, norfloxacin, ofloxacin, pefloxacin, rufloxacin, balofloxacin, gatifloxacin, grepafloxacin, levofloxacin, moxifloxacin, pazufloxacin, sparfloxacin, temafloxacin, tosufloxacin, clinafloxacin, garenoxacin, gemifloxacin, stifloxacin, trovalfloxacin, prulifloxacin, acetazolamide, benzolamide, bumetanide, celecoxib, chlorthalidone, clopamide, dichlorphenamide, dorzolamide, ethoxyzolamide, furosemide, hydrochlorothiazide, indapamide, mafendide, mefruside, metolazone, probenecid, sulfacetamide, sulfadimethoxine, sulfadoxine, sulfanilamides, sulfamethoxazole, sulfasalazine, sultiame, sumatriptan, xipamide, tetracycline, chlortetracycline, oxytetracycline, doXycycline, lymecycline, meclocycline, methacycline, minocycline, rolitetracycline and any combination thereof in amounts that are effective to additively or synergistically enhance the therapeutic effect of the bacteriophage or polypeptide of the invention for a given infection.

[0101] Local anesthetics that may be used in pharmaceutical compositions of the present invention include tetracaine, tetracaine hydrochloride, lidocain, lidocaine hydrochloride, dimethisoquin hydrochloride, dibucaine, dibucaine hydrochloride, butambenpicrate, and pramoxine hydrochloride. An exemplary concentration of local anesthetic is about 0.025% to about 5% by weight of the total composition.

[0102] Corticosteroids that may be useful in combination with the polypeptides, phage, and/or pharmaceutical compositions of the invention include betamethasone, dipropionate, fluocinolone, actinide, betamethasone valerate, triamcinolone actinide, clobetasol propionate, desoximetasone, diflorasone diacetate, amcinonide, flurandrenolide, hydrocortisone valerate, hydrocortisone butyrate, and desonide. An exemplary concentration of corticosteroid is about 0.01% to about 1% by weight of the total composition.

[0103] In certain embodiments, a formulation comprising a bacteriophage and/or polypeptide of the invention further comprises SM buffer (0.05 M Tris-HCl (pH 7.4-7.5); 0.1 M NaCl; 10 mM MgSO₄). In other embodiments, the formulation further comprises SM buffer and 10 mM MgCl₂. In still other embodiments, the formulation further comprises SM buffer and about 20% or about 30% ethanol.

[0104] Pharmaceutical compositions comprising a bacteriophage and/or polypeptide of the present invention can be formulated in a unit dose or multi-dose formulation. Suitable formulations can be selected from the group consisting of ointments, solutions, suspensions or emulsions, extracts, powders, granules, sprays, lozenges, tablets or capsules and additionally include a dispersing agent or a stabilizing agent.

[0105] The pharmaceutical compositions of the invention can be administered by inhalation, in the form of a suppository or pessary, topically (e.g., in the form of a lotion, solution, cream, ointment or dusting powder), epi- or transdermally (e.g., by use of a skin patch), orally (e.g., as a tablet, which may contain excipients such as starch or lactose), as a capsule, ovule, elixirs, solutions or suspensions (each optionally containing flavoring, coloring agents and/or excipients), or they can be injected parenterally (e.g., intravenously, intramuscularly or subcutaneously). For parenteral administration, the compositions may be best used in the form of a sterile aqueous solution which may contain other substances, for example enough salts or monosaccharides to make the solution isotonic with blood. For buccal or sublingual administration the compositions may be administered in the form of tablets or lozenges which can be formulated in a conventional manner. In a preferred embodiment, a bacteriophage and/or polypeptide of the present invention is administered topically, either as a single agent, or in combination with other antibiotic treatments as described herein or known in the art.

[0106] A bacteriophage and/or polypeptide of the present invention may also be dermally or transdermally administered. For topical application to the skin, the bacteriophages and/or polypeptides of the present invention may be combined with one, or a combination of carriers, which include but are not limited to, an aqueous liquid, an alcohol base liquid, a water soluble gel, a lotion, an ointment, a nonaqueous liquid base, a mineral oil base, a blend of mineral oil and petrolatum, lanolin, liposomes, proteins carriers such as serum albumin or gelatin, powdered cellulose carmel, and combination thereof. A topical mode of delivery may include a smear, a spray, a time-release patch, a liquid absorbed wipe, and combinations thereof. The bacteriophage and/or polypeptide of the invention may be applied to a patch or bandage either directly or in one of the carriers. The patches may be damp or dry, wherein the phage and/or polypeptide (e.g., a lysin) is in a lyophilized form on the patch. The carriers of topical compositions may comprise semi-solid and gel-like vehicles that include a polymer thickener, water, preservatives, active surfactants, or emulsifiers, antioxidants, sun screens, and a solvent or mixed solvent system. U.S. Pat. No. 5,863,560 discloses a number of different carrier combinations that can aid in the exposure of skin to a medicament, and its contents are incorporated herein.

[0107] For intranasal or administration by inhalation, the bacteriophage and/or polypeptide of the invention is conveniently delivered in the form of a dry powder inhaler or an aerosol spray presentation from a pressurized container, pump, spray or nebuliser with the use of a suitable propellant, e.g. dichlorodifluoromethane, trichlorofluoromethane, dichlorotetrafluoroethane, a hydrofluoroalkane such as 1,1,1,2-tetrafluoroethane (HFA 134A.™.) or 1,1,1,2,3,3,3-heptafluoropropane (HFA 227EA.™.), carbon dioxide or other suitable gas. In the case of a pressurized aerosol, the dosage unit may be determined by providing a valve to deliver a metered amount. The pressurized container, pump, spray or nebuliser may contain a solution or suspension of the active compound, e.g. using a mixture of ethanol and the propellant as the solvent, which may additionally contain a lubricant, e.g. sorbitan trioleate. Capsules and cartridges (made, for example, from gelatin) for use in an inhaler or insufflator may be formulated to contain a powder mix of the bacteriophage and/or polypeptide of the invention and a suitable powder base such as lactose or starch.

[0108] For administration in the form of a suppository or pessary, the therapeutic compositions may be applied topically in the form of a gel, hydrogel, lotion, solution, cream, ointment or dusting powder. Compositions of the invention may also be administered by the ocular route. For ophthalmic use, the compositions of the invention can be formulated as micronized suspensions in isotonic, pH adjusted, sterile saline, or, preferably, as solutions in isotonic, pH adjusted, sterile saline, optionally in combination with a preservative such as a benzylalkonium chloride. Alternatively, they may be formulated in an ointment such as petrolatum.

[0109] Dosages and desired drug concentrations of the pharmaceutical compositions of the present invention may vary depending on the particular use. The determination of the appropriate dosage or route of administration is well within the skill of an ordinary physician. Animal experiments can provide reliable guidance for the determination of effective doses in human therapy. Interspecies scaling of effective doses can be performed by one of ordinary skill in the art following the principles described by Mordenti, J. and Chappell, W. “The use of interspecies scaling in toxicokinetics” in Toxicokinetics and New Drug Development, Yacobi et al., Eds., Pergamon Press, New York 1989, pp 42-96.

### 6.2 Therapeutic Use

[0110] The bacteriophages and polypeptides of the present invention have activity against a plurality of strains of E. faecalis, E. faecium, P. aeruginosa, S. aureus, and/or A. baumannii-, as described in FIGS. 3A-B, 6A-B, 9, 12, 15, 18, 21, and 23. Therefore, the compositions of the present invention may used in methods of preventing and treating infections associated with E. faecalis, E. faecium, P. aeruginosa, S. aureus, and/or A. baumannii in both humans and animals. In other embodiments, the compositions of the present invention may be used to treat infection associated with related species or strains of these bacteria, including, but not limited to S. epidermidis, S. auricularis, S. capitis, S. haemolyticus, S. hominis, S. saprophyticus, S. simulans, S. xylosis, Micrococcus luteus, Bacilus subtilis, B. pumilus, E. hirae, and/or one or more of the strains of A. baumannii, e.g, one or more of the strains described in FIG. 24.

[0111] In specific embodiments, the subject receiving a pharmaceutical composition of the invention is a mammal (e.g., bovine, ovine, caprine, equid, primate (e.g., human), rodent, lagomorph or avian (e.g., chicken, duck, goose)). In the context of the present invention, “treatment” refers to therapeutic treatment and wherein the object is to eliminate, lessen, decrease the severity of, ameliorate, slow the progression of or prevent the symptoms or underlying cause (e.g., bacterial infection) associated with the pathological condition or disorder. “Treatment” refers to both therapeutic treatment and prophylactic or preventative measures, wherein the object is to eliminate, lessen, decrease the severity of, slow the progression of or delay or prevent the symptoms or underlying cause (e.g., bacterial infection) associated with the pathological condition or disorder. It is also contemplated that a bacteriophage and/or polypeptide of the invention acts as a prophylactic or preventative measure, preventing the onset of infection caused by one or more bacteria.

[0112] A. baumannii, E. faecalis, E. faecium, P. aeruginosa and S. aureus are responsible for many severe opportunistic infections, particularly in individuals with compromised immune systems. The pharmaceutical compositions of the present invention are contemplated for treating any infection associated with A. baumannii, E. faecalis, E. faecium, P. aeruginosa or S. aureus, or associated with other species or strains of bacteria, including, but not limited to, infections of the skin (including but not limited to skin ulcers, bed sores and diabetic foot ulcers), infections in and around wounds, post-operative infections, infections associated with catheters and surgical drains and infections of the blood.

[0113] A. baumannii, E. faecalis, E. faecium, P. aeruginosa and S. aureus are also associated with infections that involve organ systems that have a high fluid content, and it is contemplated that the bacteriophages and/or polypeptides of the invention have therapeutic use in the prevention and treatment of these infections. For example, the pharmaceutical compositions of the invention may be used for the prevention or treatment of infections of the respiratory tract, of the cerebrospinal fluid, of peritoneal fluid, and of the urinary tract. The compositions of the invention may also be used to prevent and/or treat nosocomial pneumonia, infections associated with continuous ambulatory peritoneal dialysis (CAPD), catheter-associated bacteruria, and nosocomial meningitis.

[0114] In a preferred embodiment, a bacteriophage and/or polypeptide of the invention is used prophylactically in hospital setting, particularly to prevent infections associated with wounds, ulcers, and openings in the skin due to catheterization, and any other medical procedures or devices.

[0115] In certain embodiments, a bacteriophage and/or polypeptide of the invention is used as a single agent for treating or preventing infections associated with A. baumannii, E. faecalis, E. faecium, P. aeruginosa, S. aureus or other bacterial species. In other embodiments of the invention, a bacteriophage and/or polypeptide of the invention is used in combination with other agents, including other bacteriophages (for example, that target a different species or strain of bacteria), or with antibiotics that target the same or different kinds of bacteria, including bacteria selected from any gram-positive bacteria, any gram-negative bacteria, and any other groups of bacteria that is not classified as gram-positive or gram-negative. The compositions of the invention may also be used in combination with any other means of treating bacterial infection known to one of skill in the art.

[0116] Also contemplated by the invention are methods of preventing and methods of treating an infection caused by bacteria including, but not limited to, E. faecalis, E. faecium, P. aeruginosa, S. aureus, and/or A. baumannii, comprising administering to a mammal in need thereof a composition comprising a lysin comprising or consisting of the amino acid sequence of SEQ ID NO:68, SEQ ID NO:184, SEQ ID NO:202, SEQ ID NO:203, SEQ ID NO:446, SEQ ID NO:447, SEQ ID NO:448, SEQ ID NO:575, SEQ ID NO:641, I.D. NO:712, and/or SEQ ID NO:797, or a fragment, variant or derivative thereof, wherein the fragment, variant or derivative exhibits antibacterial or antimicrobial activity against the species of bacteria from which the parent bacteriophage was isolated. In a specific example in accordance with this embodiment, the invention provides methods of preventing or treating an infection caused by a bacteria including, but not limited to, E. faecalis, E. faecium, P. aeruginosa, S. aureus, and/or A. baumannii, comprising administering to a mammal in need thereof a composition comprising an isolated CHAP domain of a lysin, or a fragment, variant or derivative thereof that exhibits at least one biologic activity of the CHAP domain from which it was isolated (e.g., lytic cell killing). In certain embodiments, the isolated CHAP domain comprises or consists of the amino acid sequence of SEQ ID NO:755, SEQ ID NO:756, SEQ ID NO:757, SEQ ID NO:758 or SEQ ID NO:759. In other embodiments, the invention provides methods of preventing and treating an infection caused by bacteria including, but not limited to, E. faecalis, E. faecium, P. aeruginosa, S. aureus, and/or A. baumannii, comprising administering to a mammal in need thereof a composition comprising a tail tape measure protein or tail protein comprising or consisting of the amino acid sequence of SEQ ID NO:61, SEQ ID NO:63, SEQ ID NO:204, SEQ ID NO:214, SEQ ID NO:435, SEQ ID NO:438, SEQ ID NO:440, SEQ ID NO:525, SEQ ID NO:526, SEQ ID NO:527, SEQ ID NO:528, SEQ ID NO:529, SEQ ID NO:530, SEQ ID NO:531, SEQ ID NO:532, SEQ ID NO:533, SEQ ID NO:534, SEQ ID NO:535, SEQ ID NO:536, SEQ ID NO:537, SEQ ID NO:538, SEQ ID NO:539, SEQ ID NO:567, SEQ ID NO:568, SEQ ID NO:632, SEQ ID NO:633, SEQ ID NO:700, SEQ ID NO:701, SEQ ID NO:702, SEQ ID NO:703, SEQ ID NO:704, and/or SEQ ID NO:795, or a fragment, variant or derivative thereof, wherein the fragment, variant or derivative exhibits a biologic activity associated with the parent bacteriophage. In still other embodiments, the invention provides methods of preventing and treating an infection caused by bacteria including, but not limited to, E. faecalis, E. faecium, P. aeruginosa, S. aureus, and/or A. baumannii, comprising administering to a mammal in need thereof a composition comprising bacteriophage having a genome comprising or consisting of the nucleic acid sequence of SEQ ID NO:1, SEQ ID NO:2, SEQ ID NO:3, SEQ ID NO:4, SEQ ID NO:5, SEQ ID NO:6, SEQ ID NO:7, and/or SEQ ID NO:760. Combinations of the lysins (or fragments, variants or derivatives thereof as described above) and of tail tape measure proteins or tail proteins (or fragments, variants or derivatives thereof as described above), optionally with one or more bacteriophages of the invention or with other treatments, such as antibiotics, are also contemplated, as well as methods of treating and methods of preventing a bacterial infection using one or more of the combinations herein described.

[0117] As used herein, the term “in combination” refers to the use of more than one prophylactic and/or therapeutic agent. The use of the term “in combination” does not restrict the order in which prophylactic and/or therapeutic agents are administered to a subject with a disease or disorder. A first prophylactic or therapeutic agent can be administered prior to (e.g., 5 minutes, 15 minutes, 30 minutes, 45 minutes, 1 hour, 2 hours, 4 hours, 6 hours, 12 hours, 24 hours, 48 hours, 72 hours, 96 hours, 1 week, 2 weeks, 3 weeks, 4 weeks, 5 weeks, 6 weeks, 8 weeks, or 12 weeks before), concomitantly with, or subsequent to (e.g., 5 minutes, 15 minutes, 30 minutes, 45 minutes, 1 hour, 2 hours, 4 hours, 6 hours, 12 hours, 24 hours, 48 hours, 72 hours, 96 hours, 1 week, 2 weeks, 3 weeks, 4 weeks, 5 weeks, 6 weeks, 8 weeks, or 12 weeks after) the administration of a second prophylactic or therapeutic agent (different from the first prophylactic or therapeutic agent) to a subject with a disease or disorder.

### 6.3 Disinfectant and Anti-Infective Use

[0118] Bacterial pathogens most often infect at a mucous membrane site (e.g., upper and lower respiratory, intestinal, urogenital and ocular). The mucous membranes themselves are often the reservoir, sometimes the only reservoir, for many pathogenic bacteria found in the environment (e.g. pneumococci, staphylococci and streptococci). There are very few anti-infectives that are designed to control the carrier state of pathogenic bacteria. However, studies have shown that by reducing or eliminating this reservoir in environments such as hospitals and nursing homes, the incidence of infections by these bacteria will be markedly reduced.

[0119] The bacteriophages and/or polypeptides of the present invention may be used in anti-infective compositions for controlling the growth of bacteria (e.g., Gram-positive bacteria (e.g., E. faecalis, E. faecium, S. aureus), Gram-negative bacteria (e.g., P. aeruginosa, A. baumannii) or bacteria not classified as either Gram-positive or Gram-negative), in order to prevent or reduce the incidence of serious infections. In addition to use in compositions for application to mucous membranes, a bacteriophage and/or polypeptide of the present incorporation may also be incorporated into formulations such as gels, creams, ointments, or sprays for controlling or preventing colonization of bacteria on body surfaces (e.g., skin and mucus membranes) (e.g., for sterilization of surgical fields or of the hands and exposed skin of healthcare workers and/or patients) and other solid surfaces (e.g., appliances, countertops and, in particular, hospital equipment).

### 6.4 Diagnostic Methods

[0120] The present invention also encompasses diagnostic methods for determining the causative agent in a bacterial infection. In certain embodiments, the diagnosis of the causative agent in a presentation of bacterial infection is performed by (i) culturing tissue, blood or fluid samples of a patient according to standard techniques, (ii) contacting the culture with one or more bacteriophages and/or polypeptides of the invention and (iii) monitoring cell growth and evidence of lysis after said contacting. Because the activity of bacteriophages and/or their isolated products (e.g., polypeptides, or biologically active fragments, variants or derivatives thereof) tends to be species or strain specific, susceptibility, or lack of susceptibility, to one or more bacteriophages and/or polypeptides of the invention may be indicative of the species or strain of infective bacteria. For example, decreased growth of test cultures after contacting with a bacteriophage having a genome comprising or consisting of the nucleic acid sequence SEQ ID NO:1 or SEQ ID NO:2, or with an isolated polypeptide product thereof, may be indicative of the test sample comprising E. faecalis or E. faecium. Similarly, a bacteriophage having a genome comprising or consisting of the nucleic acid sequence SEQ ID NO:3, or an isolated polypeptide product thereof, may be used to identify infection by P. aeruginosa; a bacteriophage having a genome comprising or consisting of the nucleic acid sequence SEQ ID NO:760, or an isolated polypeptide product thereof, may be used to identify infection by A. baumannii, while that having a genome comprising or consisting of the nucleic acid sequence SEQ ID NO:4, SEQ ID NO:5, SEQ ID NO:6 or SEQ ID NO:7, or an isolated polypeptide product thereof, may be used to identify infection by S. aureus.

### 6.5 Amino Acid Variants

[0121] Amino acid sequence variants of the polypeptides of the invention can be created such that they are substitutional, insertional or deletion variants. Deletion variants lack one or more residues of the native protein which are not essential for function (e.g., antimicrobial or antibacterial activity). Insertional mutants typically involve the addition of material at a non-terminal point in the polypeptide. Substitutional variants typically contain the exchange of one amino acid for another at one or more sites within the protein, and may be designed to modulate one or more properties of the polypeptide, such as stability against proteolytic cleavage, without the loss of other functions or properties. Substitutions of this kind preferably are conservative, that is, one amino acid is replaced with one of similar shape and charge. Conservative substitutions are well known in the art and include, for example, the changes of: alanine to serine; arginine to lysine; asparagine to glutamine or histidine; aspartate to glutamate; cysteine to serine; glutamine to asparagine; glutamate to aspartate; glycine to proline; histidine to asparagine or glutamine; isoleucine to leucine or valine; leucine to valine or isoleucine; lysine to arginine; methionine to leucine or isoleucine; phenylalanine to tyrosine, leucine or methionine; serine to threonine; threonine to serine; tryptophan to tyrosine; tyrosine to tryptophan or phenylalanine; and valine to isoleucine or leucine.

[0122] Once general areas of the gene are identified as encoding the particular lysin protein as described herein, point mutagenesis may be employed to identify with particularity which amino acid residues are important in the antibacterial activities. Thus, one of skill in the art will be able to generate single base changes in the DNA strand to result in an altered codon and a missense mutation.

[0123] Preferably, mutation of the amino acids of a protein creates an equivalent, or even an improved, second-generation molecule. For example, certain amino acids may be substituted for other amino acids in a protein structure without detectable loss of function (e.g., antibacterial or antimicrobial activity). In making such changes, the hydropathic index of amino acids may be considered. The importance of the hydropathic amino acid index in conferring interactive biologic function on a protein is generally understood in the art. It is accepted that the relative hydropathic character of the amino acid contributes to the secondary structure of the resultant protein, which in turn defines the interaction of the protein with other molecules, for example, interaction with a peptidoglycan within the outer coat of a gram-positive bacteria. Each amino acid has been assigned a hydropathic index on the basis of their hydrophobicity and charge characteristics; for example: isoleucine (+4.5); valine (+4.2); leucine (+3.8); phenylalanine (+2.8); cysteine/cystine (+2.5); methionine (+1.9); alanine (+1.8); glycine (−0.4); threonine (−0.7); serine (−0.8); tryptophan 0.9); tyrosine (−1.3); proline (−1.6); histidine (−3.2); glutamate (−3.5); glutamine (−3.5); aspartate (−3.5); asparagine (−3.5); lysine (−3.9); and arginine (−4.5).

[0124] It is also understood in the art that the substitution of like amino acids can be made effectively on the basis of hydrophilicity. Like hydrophobicity, values of hydrophilicity have been assigned to each amino acid: arginine (+3.0); lysine (+3.0); aspartate (+3.0+1); glutamate (+3.0+1); serine (+0.3); asparagine (+0.2); glutamine (+0.2); glycine (0); threonine (−0.4); proline (−0.5+1); alanine (−0.5); histidine (−0.5); cysteine (−1.0); methionine (−1.3); valine (−1.5); leucine (−1.8); isoleucine (−1.8); tyrosine (−2.3); phenylalanine (−2.5) and tryptophan (−3.4). Equivalent molecules may be obtained by substitution of one amino acid for another where their hydrophilicity indices are within ±2, preferably ±1, or most preferably ±5 of each other. In certain embodiments, the invention encompasses isolated peptides that comprise 1, 2, 3, 4, 5, 6, 7, 8, 9, or 10 or more amino acid modifications (e.g., insertion, substitution, deletion, etc.) relative to an amino acid sequence disclosed herein. In preferred embodiments, the mutation(s) are made such that biological activity of the particular polypeptide is retained. For example, the present invention encompasses polypeptides isolated from bacteriophage F1245/05, F168/08, F170/08, F770/05, F197/08, F86/06, F87s/06 and/or F91a/06, which are mutated to comprise 1, 2, 3, 4, 5, 6, 7, 8, 9, or 10 or more amino acid modifications relative to an amino acid sequence listed herein, and which exhibit antibacterial activity against one or more species or strains of Gram-positive or Gram-negative bacterium, e.g., A. baumannii, E. faecalis, E. faecium, P. aeruginosa and/or S. aureus. In specific embodiments, the polypeptides of the invention derived from F168/08 or F/170/08 exhibit antibacterial or antimicrobial activity, e.g., lytic killing activity, against at least E. faecalis and/or E. faecium; those derived from F770/05 against at least P. aeruginosa; those derived from F197/08, F86/06, F87s/06 or F91a/06 against at least S. aureus; and those derived from F1245/05 against at least A. baumannii.

### 6.6 Polynucleotides Encoding Polypeptides of the Invention

[0125] The invention provides polynucleotides comprising a nucleotide sequence encoding a polypeptide of the invention. The invention also encompasses polynucleotides that hybridize under high stringency, intermediate or lower stringency hybridization conditions, e.g., as defined supra, to polynucleotides that encode a polypeptide of the invention and that encode modified polypeptides that have antibiotic and/or other biological activity.

[0126] The polynucleotides may be obtained, and the nucleotide sequence of the polynucleotides determined, by any method known in the art. For example, a polynucleotide encoding a polypeptide of the invention may be generated from nucleic acid from a suitable source (e.g., bacteriophage F1245/05, F168/08, F170/08, F770/05, F197/08, F197/08, F86/06, F87s/06 or F91a/06). Nucleotide sequences may be isolated from phage genomes by routine methods known in the art (see, e.g., Carlson, “Working with bacteriophages: common techniques and methodological approaches,” In, Futter and Sulakvelidze (Eds) Bacteriophages: Biology and Applications, 5^{th} ed. CRC Press (2005); incorporated herein by reference in its entirety). If a source containing a nucleic acid encoding a particular polypeptide is not available, but the amino acid sequence of the polypeptide of the invention is known, a nucleic acid encoding the polypeptide may be chemically synthesized and cloned into replicable cloning vectors using any method well known in the art.

[0127] Once the nucleotide sequence of the polypeptide of the invention is determined, the nucleotide sequence of the polypeptide may be manipulated using methods well known in the art for the manipulation of nucleotide sequences, e.g., recombinant DNA techniques, site directed mutagenesis, PCR, etc. (see, for example, the techniques described in Sambrook et al., 1990, Molecular Cloning, A Laboratory Manual, 2d Ed., Cold Spring Harbor Laboratory, Cold Spring Harbor, N.Y. and Ausubel et al., eds., 1998, Current Protocols in Molecular Biology, John Wiley & Sons, NY, which are both incorporated by reference herein in their entireties), to generate polypeptides having a different amino acid sequence, for example to create amino acid substitutions, deletions, and/or insertions.

[0128] In yet another embodiment of the invention, the following nucleotide sequences are provided: the nucleotide sequence from nucleotide 1 to nucleotide 85 of SEQ ID NO:760; the nucleotide sequence from nucleotide 87 to nucleotide 584 of SEQ ID NO:760; the nucleotide sequence from nucleotide 594 to nucleotide 767 of SEQ ID NO:760; the nucleotide sequence from nucleotide 724 to nucleotide 1035 of SEQ ID NO:760; the nucleotide sequence from nucleotide 1005 to nucleotide 1823 of SEQ ID NO:760; the nucleotide sequence from nucleotide 1816 to nucleotide 2130 of SEQ ID NO:760; the nucleotide sequence from nucleotide 2132 to nucleotide 2383 of SEQ ID NO:760; the nucleotide sequence from nucleotide 2383 to nucleotide 3690 of SEQ ID NO:760; the nucleotide sequence from nucleotide 3687 to 4469 of SEQ ID NO:760; the nucleotide sequence from nucleotide 4466 to nucleotide 5458 of SEQ ID NO:760; the nucleotide sequence from nucleotide 5632 to nucleotide 7956 of SEQ ID NO:760; the nucleotide sequence from nucleotide 8010 to nucleotide 8912 of SEQ ID NO:760; the nucleotide sequence from nucleotide 8915 to nucleotide 9262 of SEQ ID NO:760; he nucleotide sequence from nucleotide 9252 to nucleotide 10223 of SEQ ID NO:760; he nucleotide sequence from nucleotide 10213 to nucleotide 10782 of SEQ ID NO:760; the nucleotide sequence from nucleotide 10769 to nucleotide 11218 of SEQ ID NO:760; the nucleotide sequence from nucleotide 11202 to nucleotide 11420 of SEQ ID NO:760; the nucleotide sequence from nucleotide 11413 to nucleotide 12342 of SEQ ID NO:760; the nucleotide sequence from nucleotide 12339 to nucleotide 12515 of SEQ ID NO:760; the nucleotide sequence from nucleotide 12512 to nucleotide 13165 of SEQ ID NO:760; the nucleotide sequence from nucleotide 13170 to nucleotide 15599 of SEQ ID NO:760; the nucleotide sequence from nucleotide 15609 to nucleotide 15872 of SEQ ID NO:760; the nucleotide sequence from nucleotide 15979 to nucleotide 16173 of SEQ ID NO:760; the nucleotide sequence from nucleotide 16175 to nucleotide 16482 of SEQ ID NO:760; the nucleotide sequence from nucleotide 16494 to nucleotide 18059 of SEQ ID NO:760; the nucleotide sequence from nucleotide 18072 to nucleotide 18815 of SEQ ID NO:760; the nucleotide sequence from nucleotide 18857 to nucleotide 19879 of SEQ ID NO:760; the nucleotide sequence from nucleotide 19930 to nucleotide 20178 of SEQ ID NO:760; the nucleotide sequence from nucleotide 20180 to nucleotide 20545 of SEQ ID NO:760; the nucleotide sequence from nucleotide 20646 to nucleotide 21203 of SEQ ID NO:760; the nucleotide sequence from nucleotide 21212 to nucleotide 23506 of SEQ ID NO:760; the nucleotide sequence from nucleotide 23506 to nucleotide 24186 of SEQ ID NO:760; the nucleotide sequence from nucleotide 24201 to nucleotide 27068 of SEQ ID NO:760; the nucleotide sequence from nucleotide 27084 to nucleotide 30212 of SEQ ID NO:760; the nucleotide sequence from nucleotide 30214 to nucleotide 32505 of SEQ ID NO:760; the nucleotide sequence from nucleotide 32515 to nucleotide 32880 of SEQ ID NO:760; the nucleotide sequence from nucleotide 32873 to nucleotide 33460 of SEQ ID NO:760; the nucleotide sequence from nucleotide 33460 to nucleotide 33816 of SEQ ID NO:760; the nucleotide sequence from nucleotide 33825 to nucleotide 35777 of SEQ ID NO:760; the nucleotide sequence from nucleotide 35774 to nucleotide 35872 of SEQ ID NO:760; the nucleotide sequence from nucleotide 35869 to nucleotide 36027 of SEQ ID NO :760; the nucleotide sequence from nucleotide 36038 to nucleotide 36193 of SEQ ID NO:760; the nucleotide sequence from nucleotide 36916 to nucleotide 36788 of SEQ ID NO:760; the nucleotide sequence from nucleotide 37209 to nucleotide 37427 of SEQ ID NO:760; the nucleotide sequence from nucleotide 37868 to nucleotide 38386 of SEQ ID NO:760; the nucleotide sequence from nucleotide 38383 to nucleotide 38586 of SEQ ID NO:760; the nucleotide sequence from nucleotide 38912 to nucleotide 39406 of SEQ ID NO:760; the nucleotide sequence from nucleotide 39406 to nucleotide 39915 of SEQ ID NO:760; the nucleotide sequence from nucleotide 39917 to nucleotide 40021 of SEQ ID NO:760; the nucleotide sequence from nucleotide 40018 to nucleotide 40101 of SEQ ID NO :760; the nucleotide sequence from nucleotide 40101 to nucleotide 40670 of SEQ ID NO :760; the nucleotide sequence from nucleotide 40720 to nucleotide 41838 of SEQ ID NO:760; the nucleotide sequence from nucleotide 41822 to nucleotide 42127 of SEQ ID NO:760; the nucleotide sequence from nucleotide 42105 to nucleotide 42308 of SEQ ID NO:760; the nucleotide sequence from nucleotide 42382 to nucleotide 42912 of SEQ ID NO:760; and the nucleotide sequence from nucleotide 42896 to nucleotide 43015 of SEQ ID NO:760.

### 6.7 Recombinant Expression of Molecules of the Invention

[0129] Once a nucleic acid sequence encoding a molecule of the invention (e.g., a polypeptide) has been obtained, the vector for the production of the molecules may be produced by recombinant DNA technology using techniques well known in the art. Methods which are well known to those skilled in the art can be used to construct expression vectors containing the coding sequences for the molecules of the invention and appropriate transcriptional and translational control signals. These methods include, for example, in vitro recombinant DNA techniques, synthetic techniques, and in vivo genetic recombination. (See, for example, the techniques described in Sambrook et al., 1990, Molecular Cloning, A Laboratory Manual, 2d Ed., Cold Spring Harbor Laboratory, Cold Spring Harbor, N.Y. and Ausubel et al. eds., 1998, Current Protocols in Molecular Biology, John Wiley & Sons, NY).

[0130] The present invention provides expression vectors encoding the polypeptides of the invention. An expression vector comprising the nucleotide sequence of a molecule identified by the methods of the invention can be transferred to a host cell by conventional techniques (e.g., electroporation, liposomal transfection, and calcium phosphate precipitation) and the transfected cells are then cultured by conventional techniques to produce the molecules of the invention. In preferred embodiments, the host cell is other than the species of the parent bacteria from which the bacteriophage comprising the sequence was derived. In specific embodiments, the expression of the molecules of the invention is regulated by a constitutive, an inducible or a tissue, specific promoter. In specific embodiments the expression vector is pQE-30 (Qiagen) or pET-29(a) (Novagen).

[0131] The host cells used to express the molecules identified by the methods of the invention may be either bacterial cells (non susceptible to the bacteriophage protein or fragment thereof of the invention) such as Escherichia coli. A variety of host-expression vector systems may be utilized to express the molecules identified by the methods of the invention. Such host-expression systems represent vehicles by which the coding sequences of the molecules of the invention may be produced and subsequently purified, but also represent cells which may, when transformed or transfected with the appropriate nucleotide coding sequences, express the molecules of the invention in situ. These include, but are not limited to, microorganisms such as bacteria that are not susceptible to the bacteriophage protein or fragment thereof of the invention (e.g., E. coli and B. subtilis) transformed with recombinant bacteriophage DNA, plasmid DNA or cosmid DNA expression vectors containing coding sequences for the molecules identified by the methods of the invention; yeast (e.g., Saccharomyces Pichia) transformed with recombinant yeast expression vectors containing sequences encoding the molecules identified by the methods of the invention; insect cell systems infected with recombinant virus expression vectors (e.g., baculovirus) containing the sequences encoding the molecules identified by the methods of the invention; plant cell systems infected with recombinant virus expression vectors (e.g., cauliflower mosaic virus (CaMV) and tobacco mosaic virus (TMV) or transformed with recombinant plasmid expression vectors (e.g., Ti plasmid) containing sequences encoding the molecules identified by the methods of the invention; or mammalian cell systems (e.g., COS, CHO, BHI, 293, 293T, 3T3 cells, lymphotic cells (see U.S. Pat. No. 5,807,715), Per C.6 cells (human retinal cells developed by Crucell) harboring recombinant expression constructs containing promoters derived from the genome of mammalian cells (e.g., metallothionein promoter) or from mammalian viruses (e.g., the adenovirus late promoter; the vaccinia virus 7.5K promoter).

[0132] In bacterial systems not susceptible to the bacteriophage protein or fragment of the invention, a number of expression vectors may be advantageously selected depending upon the use intended for the molecule being expressed. For example, when a large quantity of such a protein is to be produced, for the generation of pharmaceutical compositions of a polypeptide, vectors which direct the expression of high levels of fusion protein products that are readily purified may be desirable. Such vectors include, but are not limited, to the E. coli expression vector pUR278 (Ruther et al., 1983, EMBO J. 2:1791), in which the protein sequence may be ligated individually into the vector in frame with the lac Z coding region so that a fusion protein is produced; pIN vectors (Inouye & Inouye, 1985, Nucleic Acids Res. 13:3101-3109; Van Heeke & Schuster, 1989, J. Biol. Chem. 24:5503-5509); and the like. pGEX vectors may also be used to express foreign polypeptides as fusion proteins with glutathione S-transferase (GST). In general, such fusion proteins are soluble and can easily be purified from lysed cells by adsorption and binding to a matrix glutathione-agarose beads followed by elution in the presence of free gluta-thione. The pGEX vectors are designed to include thrombin or factor Xa protease cleavage sites so that the cloned target gene product can be released from the GST moiety.

[0133] In an insect system, Autographa californica nuclear polyhedrosis virus (AcNPV) is used as a vector to express foreign genes. The virus grows in Spodoptera frugiperda cells. The polypeptide coding sequence may be cloned individually into non-essential regions (e.g., the polyhedrin gene) of the virus and placed under control of an AcNPV promoter (e.g., the polyhedrin promoter).

[0134] Once a molecule of the invention (i.e., polypeptides) has been recombinantly expressed, it may be purified by any method known in the art for purification of polypeptides, for example, by chromatography (e.g., ion exchange, affinity, and sizing column chromatography), centrifugation, differential solubility, or by any other standard technique for the purification of polypeptides or antibodies.

[0135] Certain modifications and improvements will occur to those skilled in the art upon a reading of the foregoing description. It should be understood that all such modifications and improvements have been deleted herein for the sake of conciseness and readability but are properly within the scope of the following claims.

### EXAMPLES

[0136] It is understood that the following examples and embodiments described herein are for illustrative purposes only and that various modifications or changes in light thereof will be suggestive to persons skilled in the art and are to be included within the spirit and purview of this application and the scope of the appended claims. All publications, patents, and patent applications cited herein are hereby incorporated by reference in their entirety for all purposes.

[0137] Unless otherwise indicated, the bacteriophages of the invention were isolated, processed and analyzed according to the following methods.

### 7.1 Methods

### 7.1.1 Purification of Phage.

[0138] Stock preparations of bacteriophage isolated from clinical samples were prepared according to protocols described in Carlson, “Working with bacteriophages: common techniques and methodological approaches,” In, Kutter and Sulakvelidze (Eds) Bacteriophages: Biology and Applications, 5^{th} ed. CRC Press (2005) (“Carlson,” incorporated herein by reference in its entirety).

[0139] The bacteriophage stock preparations were concentrated by precipitation with PEG according to the protocol described Carlson and Yamamoto et al., 2004, PNAS 101:6415-6420. Briefly, the stock preparation was incubated in 1 M NaCl for one hour at 4° C. with agitation. Next, PEG 8000 (AppliChem, Cheshire, Mass.) was gradually added to a final concentration of 10% (w/v). The composition was then incubated overnight at 4° C. After the incubation period, the composition was centrifuged at 10000×g for 30 minutes at 4° C. The sediment was then re-suspended in SM buffer (0.05 M Tris-HCL at pH 7.4, 0.1 M NaCl, 10 mM MgSO₄) with gelatin at 1% w/v and centrifuged again at 1000 rpm at 4° C. for 10 minutes. The supernatant containing the suspended phage was saved for further purification. The supernatant was purified using a CsCl gradient according to the methods in Carlson.

[0140] CsCl was removed from the purified and concentrated phage stock by dialysis. A dialysis membrane, Cellu.Sep H1 High Grade Regenerated Cellulose Tubular Membrane (Cellu.Sep, River Street, USA), was prepared according to the manufacturers' instructions. The dialysis consisted of a first incubation of 30 minutes in 100 mM Tris-HCl and 3 M NaCl (pH 7.4) at 4° C. This was followed by a second incubation of 30 minutes in 100 mM Tris-HCl and 0.3 M NaCl (pH 7.4) at 4° C. After dialysis, the suspended phage was removed from the interior of the dialysis bag and stored at 4° C.

### 7.1.2 Extraction of Phage Dna

[0141] To 5 ml of the purified and concentrated bacteriophage samples was added 20 mM EDTA at pH 8.0, SDS at 0.5% (p/v) and Proteinase K at a final concentration of 40 μg/ml. The mixture was incubated at 56° C. for one hour. Successive extractions in phenol:chloroform:alcohol at a proportions of 25:24:1, were performed until the interface between the aqueous and organic phases was clear. The aqueous phase was then treated with an equal volume of chloroform and centrifuged at 13,0000×g for 10 minutes at 4° C. The aqueous phase was once again removed, and the DNA was precipitated by adding two volumes of absolute ethanol and incubating for thirty minutes at 20° C. The samples were then centrifuged at 11,000×g for 30 minutes at 4° C. The pellet was washed with 70% ethanol at room temperature and resuspended in 50 μl of ultra-pure water (Gibco, California). DNA concentration was determined by measuring the absorbance at 260 nm in a ND-1000 Spectrophotometer. Integrity of the isolated phage DNA was analyzed by electrophoresis on a 1% agarose gel.

### 7.1.3 Analysis of Bacteriophage Genomes

[0142] Sequencing of the bacteriophage genome allowed identification of potential open reading frames (ORFs) within the genome. The putative ORFs of the bacteriophages were used to search the NCBI nucleotide collection database for homologous DNA sequences using the BLASTN program (see, e.g., Zhang et al., 2000, J. Comput. Biol. 7:203-214).

### Example 1

### Bacteriophage F168/08

[0143] Comparison of the putative ORFs of the bacteriophage F168/08 genome with the sequences in the NCBI nucleotide database revealed that only small portions of the genome (≦1%) exhibited homology with known sequences. The F168/08 ORFs, their encoded amino acid sequences and known homologous proteins are provided in FIG. 2. Prediction of orfs was performed by integrating the results obtained with GeneMark.hmm and MetaGeneAnnotator programs (Besemer, J. and Borodovsky, M. 1999. Nucleic Acids Res., 27: 3911-3920; Noguchi, H. et al., 2008. DNA Res., 15: 387-396). Protein homology searches were carried out with BLASTP program (Alschul, S.F. et al., 1997. Nucleic Acids Res., 25: 3389-33402) using the NCBI non-redundant protein sequences database. Protein conserved domains were predicted using NCBI specialized BLAST (Marchler-Bauer, A. et al., 2007. Nucleic Acids Res. 35: 237-240). orfs whose products presented homology with the same protein(s) are indicated with the same number added of a lowercase letter, in FIG. 2. Identification of putative transfer RNA genes (tRNA) was carried out using the tRNAscan-SE progam (Lowe, T. M. et al., 1997. Nucleic Acids Res., 25: 955-964).

[0144] FIGS. 3A-B provide the results of spot tests that assessed the activity of the bacteriophage F168/08 against 105 Enterococcus faecalis (A) and 56 Enterococcus faecium (B) strains isolated from clinical samples. Each spot consisted of 5 μl of bacteriophage suspension with the indicated titers, prepared from a CsCl purified lysate. Sensitivity to the phage is represented as a scale ranging from turbid (+) to clear (++++) lysis halos. Resistance to phage infection is indicated as (−).

### Example 2

### Bacteriophage F170/08

[0145] Comparison of the putative ORFs of the bacteriophage F170/08 genome with the sequences in the NCBI nucleotide database revealed that about 94% of its genome was highly similar to that of Enterococcus phage ΦEF24C, with individual ORF identities ranging from 80 to 100%. The F170/08 ORFs, their encoded amino acid sequences and known homologous proteins are provided in FIG. 5. Prediction of orfs was performed by integrating the results obtained with GeneMark.hmm and MetaGeneAnnotator programs (Besemer, J. and Borodovsky, M. 1999. Nucleic Acids Res., 27: 3911-3920; Noguchi, H. et al., 2008. DNA Res., 15: 387-396). Protein homology searches were carried out with BLASTP program (Alschul, S. F. et al., 1997. Nucleic Acids Res., 25: 3389-33402) using the NCBI non-redundant protein sequences database. Protein conserved domains were predicted using NCBI specialized BLAST (Marchler-Bauer, A. et al., 2007. Nucleic Acids Res. 35: 237-240). ° ifs whose products presented homology with the same protein(s) are indicated with the same number added of a lowercase letter, in FIG. 5. Identification of putative transfer RNA genes (tRNA) was carried out using the tRNAscan-SE progam (Lowe, T. M. et al., 1997. Nucleic Acids Res., 25: 955-964).

[0146] FIGS. 6A-B provide the results of spot tests that assessed the activity of the bacteriophage F170/08 against 105 Enterococcus faecalis (A) and 56 Enterococcus faecium (B) strains isolated from clinical samples. Each spot consisted of 5 μl of bacteriophage suspension with the indicated titers, prepared from a CsCl purified lysate. Sensitivity to the phage is represented as a scale ranging from turbid (+) to clear (++++) lysis halos. Resistance to phage infection is indicated as (−).

### Example 3

### Bacteriophage F770/05

[0147] Comparison of the putative ORFs of the bacteriophage F770/05 genome with the sequences in the NCBI nucleotide database revealed that only small portions of the genome (≦1%) exhibited homology with known sequences. The F170/05 ORFs, their encoded amino acid sequences and known homologous proteins are provided in FIG. 8. Prediction of ° ifs was performed by integrating the results obtained with GeneMark.hmm and MetaGeneAnnotator programs (Besemer, J. and Borodovsky, M. 1999. Nucleic Acids Res., 27: 3911-3920; Noguchi, H. et al., 2008. DNA Res., 15: 387-396). Protein homology searches were carried out with BLASTP program (Alschul, S. F. et al., 1997. Nucleic Acids Res., 25: 3389-33402) using the NCBI non-redundant protein sequences database. Protein conserved domains were predicted using NCBI specialized BLAST (Marchler-Bauer, A. et al., 2007. Nucleic Acids Res. 35: 237-240).

[0148] FIG. 9 provides the results of spot tests that assessed the activity of the bacteriophage F170/05 against 100 Pseudomonas aeruginosa strains isolated from clinical samples. Each spot consisted of 5 μl of bacteriophage suspension with the indicated titers, prepared from a CsCl purified lysate. Sensitivity to the phage is represented as a scale ranging from turbid (+) to clear (++++) lysis halos. Resistance to phage infection is indicated as (−).

### Example 4

### Bacteriophage F197/08

[0149] Comparison of the putative ORFs of the bacteriophage F197/08 genome with the sequences in the NCBI nucleotide database revealed that the genome was highly homologous with multiple staphylococcal phage genomes. In particular, about 90% of the F197/08 genome is highly similar to that of Staphylococcus bacteriophage phiSauS-IPLA35, with individual ORF identities ranging from 80 to 98%. The F197/08 ORFs, their encoded amino acid sequences and known homologous proteins are provided in FIG. 11. Prediction of orfs was performed by integrating the results obtained with GeneMark.hmm and MetaGeneAnnotator programs (Besemer, J. and Borodovsky, M. 1999. Nucleic Acids Res., 27: 3911-3920; Noguchi, H. et al., 2008. DNA Res., 15: 387-396). Protein homology searches were carried out with BLASTP program (Alschul, S.F. et al., 1997. Nucleic Acids Res., 25: 3389-33402) using the NCBI non-redundant protein sequences database. Protein conserved domains were predicted using NCBI specialized BLAST (Marchler-Bauer, A. et al., 2007. Nucleic Acids Res. 35: 237-240). offs whose products presented homology with the same protein(s) are indicated with the same number added of a lowercase letter, in FIG. 11.

[0150] FIG. 12 provides the results of spot tests that assessed the activity of the bacteriophage F197/08 against 100 Staphylococcus aureus strains isolated from clinical samples. Each spot consisted of 5 μl of bacteriophage suspension with the indicated titers, prepared from a CsCl purified lysate. Sensitivity to the phage is represented as a scale ranging from turbid (+) to clear (++++) lysis halos. Resistance to phage infection is indicated as (−).

### Example 5

### Bacteriophage F86/06

[0151] Comparison of the putative ORFs of the bacteriophage F86/06 genome with the sequences in the NCBI nucleotide database revealed that the genome was highly homologous with multiple staphylococcal phage genomes. In particular, about 80% of the F86/06 genome is highly similar to that of Staphylococcus bacteriophage tp310-1, with individual ORF identities ranging from 85 to 100%. The F86/06 ORFs, their encoded amino acid sequences and known homologous proteins are provided in FIG. 14. Prediction of orfs was performed by integrating the results obtained with GeneMark.hmm and MetaGeneAnnotator programs (Besemer, J. and Borodovsky, M. 1999. Nucleic Acids Res., 27: 3911-3920; Noguchi, H. et al., 2008. DNA Res., 15: 387-396). Protein homology searches were carried out with BLASTP program (Alschul, S. F. et al., 1997. Nucleic Acids Res., 25: 3389-33402) using the NCBI non-redundant protein sequences database. Protein conserved domains were predicted using NCBI specialized BLAST (Marchler-Bauer, A. et al., 2007. Nucleic Acids Res. 35: 237-240).

[0152] FIG. 15 provides the results of spot tests that assessed the activity of the bacteriophage F86/06 against 100 Staphylococcus aureus strains isolated from clinical samples. Each spot consisted of 5 μl of bacteriophage suspension with the indicated titers, prepared from a CsCl purified lysate. Sensitivity to the phage is represented as a scale ranging from turbid (+) to clear (++++) lysis halos. Resistance to phage infection is indicated as (−).

### Example 6

### Bacteriophage F87s/06

[0153] Comparison of the putative ORFs of the bacteriophage F87s/06 genome with the sequences in the NCBI nucleotide database revealed that the genome was highly homologous with multiple staphylococcal phage genomes. In particular, about 82% of the F87s/06 genome is highly similar to that of Staphylococcus bacteriophage ΦNM3, with individual ORF identities ranging from 90 to 100%. The F86/06 ORFs, their encoded amino acid sequences and known homologous proteins are provided in FIG. 17. Prediction of ° ifs was performed by integrating the results obtained with GeneMark.hmm and MetaGeneAnnotator programs (Besemer, J. and Borodovsky, M. 1999. Nucleic Acids Res., 27: 3911-3920; Noguchi, H. et al., 2008. DNA Res., 15: 387-396). Protein homology searches were carried out with BLASTP program (Alschul, S. F. et al., 1997. Nucleic Acids Res., 25: 3389-33402) using the NCBI non-redundant protein sequences database. Protein conserved domains were predicted using NCBI specialized BLAST (Marchler-Bauer, A. et al., 2007. Nucleic Acids Res. 35: 237-240). coifs whose products presented homology with the same protein(s) are indicated with the same number added of a lowercase letter, in FIG. 17.

[0154] FIG. 18 provides the results of spot tests that assessed the activity of the bacteriophage F87s/06 against 100 Staphylococcus aureus strains isolated from clinical samples. Each spot consisted of 5 μl of bacteriophage suspension with the indicated titers, prepared from a CsCl purified lysate. Sensitivity to the phage is represented as a scale ranging from turbid (+) to clear (++++) lysis halos. Resistance to phage infection is indicated as (−).

### Example 7

### Bacteriophage F91a/06

[0155] Comparison of the putative ORFs of the bacteriophage F91a/06 genome with the sequences in the NCBI nucleotide database revealed that the genome was highly homologous with multiple staphylococcal phage genomes. In particular, about 82% of the F91a/06 genome is highly similar to that of Staphylococcus bacteriophage ONM3, with individual ORF identities ranging from 86 to 99%. The F91a/06 ORFs, their encoded amino acid sequences and known homologous proteins are provided in FIG. 20. Prediction of orfs was performed by integrating the results obtained with GeneMark.hmm and MetaGeneAnnotator programs (Besemer, J. and Borodovsky, M. 1999. Nucleic Acids Res., 27: 3911-3920; Noguchi, H. et al., 2008. DNA Res., 15: 387-396). Protein homology searches were carried out with BLASTP program (Alschul, S. F. et al., 1997. Nucleic Acids Res., 25: 3389-33402) using the NCBI non-redundant protein sequences database. Protein conserved domains were predicted using NCBI specialized BLAST (Marchler-Bauer, A. et al., 2007. Nucleic Acids Res. 35: 237-240).)ifs whose products presented homology with the same protein(s) are indicated with the same number added of a lowercase letter, in FIG. 20.

[0156] FIG. 21 provides the results of spot tests that assessed the activity of the bacteriophage F9 1a/06 against 100 Staphylococcus aureus strains isolated from clinical samples. Each spot consisted of 5 μl of bacteriophage suspension with the indicated titers, prepared from a CsCl purified lysate. Sensitivity to the phage is represented as a scale ranging from turbid (+) to clear (++++) lysis halos. Resistance to phage infection is indicated as (−).

### Example 8

### Bacteriophage F1245/05

[0157] F1245/05 ORFs, their encoded amino acid sequences and known homologous proteins are provided in FIGS. 23A-I. Prediction of orfs was performed by integrating the results obtained with GeneMark.hmm and MetaGeneAnnotator programs (Besemer, J. and Borodovsky, M. 1999. Nucleic Acids Res., 27: 3911-3920; Noguchi, H. et al., 2008. DNA Res., 15: 387-396). Protein homology searches were carried out with BLASTP program (Alschul, S.F. et al., 1997. Nucleic Acids Res., 25: 3389-33402) using the NCBI non-redundant protein sequences database. Protein conserved domains were predicted using NCBI specialized BLAST (Marchler-Bauer, A. et al., 2007. Nucleic Acids Res. 35: 237-240). Protein function was predicted based on genome localization of the corresponding gene and on the presence of putative transmembrane domains of the encoded product (TMHMM server v. 2.0; Krogh, A. et al., 2001. J. Mol. Biol., 305: 567-580.

[0158] FIGS. 24 A-E provides the results of spot tests that assessed the activity of the bacteriophage F1245/05 against 100 Acinetobacter baumanni strains isolated from clinical samples. Each spot consisted of 5 μl of bacteriophage suspension with the indicated titers, prepared from a CsCl purified lysate. Sensitivity to the phage is represented as a scale ranging from turbid (+) to clear (++++) lysis halos. Resistance to phage infection is indicated as (−).

The application's sequence listing, which the Patent Office published only in electronic form, follows.

SEQUENCE LISTING (816 sequences)

SEQ ID NO: 1 - DNA, 58199 bp, Bacteriophage F170/08
tggacaagctttttccataacattgtgggctatgatgagccattatcaaaagaagttttaacagcttatcacttaaaagaaattactgatttaaatgagcttcctgagcatcataagaaagtatttgaaacactttcagcaattgagtacagcactgtggagcaggctttaaaaacatttaaaactaattatgtggagggaatttagtatggagttcttaaagtatccatcattagtcaatcattacgctattggaaagtcaaagcgtttagtaaatcgttttgataatattctttggtatgcctctgagaaaatccatggagccaacgcttcttatgccttatcagcaactggggaagagtatttcgcaaagcgtagtggaattatttctaaagacgataaacaattttcaatgcttccagaatgtgttacctcagacattcgagaaggtaccaaaaaagcttttcgaatactatcctaaagcagaatcaatccacgtatttggagagttctttggcaaaggcgttcaagtaatggattacgaccttgttaaagaaggtaaaaaagcttttcgagtattcgatgttattgctaagtatgatgatggctctatggcagtctgtggaatcaatacttggaaacacctttttgaacaggactccatcgttccttattacacgttaggaaagaccttaaaagagtttttagaaactccaccaagtgaggaatcggctttgggaggttattctgaaggcgttgtattaaaacctctacaaggttatcctattaactctacacaagacttcttaggtgttaagtacaagactgaaaagtatttagaagtcagacacaagccttctgaacagcgtaagaaaccacctaagctgaacaatgagcaagtagaagctttaaatgagcttggtaaatacattactaaacagcgtgtgttaaatgtttgttcacatggtgactttgagcttattcagaataatatcggaaagattatgctagccgttaagcaagacgctgccaatgaatttattaaagaagttggctcaagctttactgaaaaaagagcttgtaggtctctctaatgcctattcaggtgaaatcgcaaagtatattaaagaagtaatttatgaaagttcacttgagctgttgacagataattaattaagtgatatactgctaatataacaactttgggaggaatttttttatggattttaacacacttattgaacaagtacaagaatggtcagctaacaaaggattagacaaagctgctcctgagaaacaatttttaaaagttattgaagaggttggagaagtagccgctgctatggctcgtaacgaccgagaagagcttgtggatggccttggagatacttttgtaacattaattatcctttgccaacagcttggagtagttcctcatgaagctttagacactgcttatggagttatttctaagcgaacaggcaagatggttgatggagtttttgtgaaaagcgaggatttataaggtaatttaataaacttaaccaacagcctttaggaagagtaatacctaggggctgtttttttagttttcaaaaaggcaggggagaaattttttaaaaaaatttttttccaaacttcaaaaaatttaaaaaatttttcttaaaagtttttcctaaaagcgctactggattacattattagcgcttattttacatatttattgaaatagcgtgtcgcacaggcgcattctgagcgcatttcgcactgctttctgcacaactatccacatatttgttgtgtggcgccttatatatgctgttgcacatgccttgccactgcttttgcttagcattattggattaggctactatatatgcactatcatgtgcctttactatatcctatcccctatgctttatagatagttttactataggttaccttaggttatgttactataccttactatactaccccccccccccagtttccacgagaagtgccctataaggggctttttaagcatttttacgcctttttaaaggcttttcttgctctttttatgcgcctttttgcacgttctttcttaaaatccatcaaaacacttttataacagctttttcaggttgtttttaaaagtttctactatataaagcgccgtttttatgtaaaagctgccaaaaagaatttaaaaaagttgtattttattgttgacaggcatttttgaaagtgatatattaaaggtgtagcaacgaactacaaaaataaatttaagaaagaggttttataaaatgatgaaattaatcgaattagacaatgggcggaagcaagttttttacaacaatgttttaatgcaatacgaaagacgtggcagcgatgtatatggcaatccattatatcgagtatatccaataaacttttctttcaaacgtttaaaaagcgtttatagaaattacgaaaaaggtggctgggaagaatcttactatcttatccaaagttataacattttagcggatatgcaaaacattgccagcgaagtaaacgcaaaaaacacttttccagagtttgaccaaactttattgaaagattatcgggaggtttcggcgtatgtataagaaaaccattgaaaaattatacaaaagttatatgagtacttgtaaagagtttcgggctaaggtaacatttactcaatacgtgataggagagtactaaaaaatggcgttaacaatgtttgaaaaagagagcttacaaaaagaaaatgcacgacttaaaagagagctggccactttaaaggctagccaaaaactaggcggagggcttaacgaaaaagaattacaaaaggcactcaacagctgccagcgaattttcaaaactttaaatagaggtaaaagaagccttgttctaagtaaatccgccatggtggctagtgtggaatattcgggaagtggtcgctcaaaaaacttataaagattgttccaagacagcaataagagaggcagaaaaaagcgcctgggagattatgagcctagagaacgactttagaaatattcatcactttttgaaacatggaacaatgaaagcggaggacaaagacaatgcttaatattattgtaacagtaatttcaacagcagctgtttttaaaggcgctagaaatggtgaataaaaaactttccgatagacttaccaagtctatcaagttttcaagaaagaaagctaaaaagcgctttattattgcacgtgtgacggaagaacaagcttatactttgcgactattaaaagctatttccaaagaggatgaagctgtatgcaaagccacaaataaagctttgctagaatacggctatgaagaagcaggtgggcattcttatgagaaagctcgggaaaagttttcctctttgcccgatgtaaaaaaatggcataccaatcgacgaactagaaagcgatgaagaagcggacgtacagccttttttaaaaaaatttattaaaatgcttgcaatccgcttggtgatttggtattataaatgcagttagaaaggaggtaacaagaaaatgagtaaagctttttacatggcactaggcggatttttggcaagcttttttcacagggcatgccacagtagcgtattttatggcttgcgctgtagcgttgacaattgcaatccaaacaatttataaaaaaagattagtcaaaatagttgacaagtatttaaaaaagtagtaagataaacgtataagataacaagtaacaaatacacattcgataaggttagggcaatcctttaaaaaaagcctatactaaaataacataaaaggcggtttttaacatgacaaagaatcattataaattatatgtagatatgaaagagggaactcacgattatgtttcggcaactgtctatagtatgtttgatgaaaaagttttatggttgccagatattaaaaaacccgaaaacgtagccgactatactgatgaatggaaaaacgggctatattcttactacgaaaaactcgcaatatcagagttaaacgactacaatgctactttttcacatttataaaaaaattaaaaaactattaacaaaaaacaataactagtgtaaggaggaacaaacctctttacaccacacaacagaaaggaagtttttactatgacagaatttgctaatatgaacaaagaagaggtattggaattacttaatgattggtttggtgttagtgactatgttacagttatggcagaattagaaaagatgaaacaagttacctttacaggtagcacggacatacctttgttaggtggtaacaatgacttgatcggtttacctcaattttttaaaggtaacgaagtagaaccagagttcccaacttatgaagaactattagaggaactagaaaaagatacatggaatcttgaagcagaggacaacacttataattatagtggtttcctagagcgtgatatggactttaaaactattcatgcagaaaattcagacacgactattgcattctttgcaatccatacggggggtagacataagagcgggctactcaaaagcaatcccatttattttttgaaacttactacgattttcaagagttcctaggtaactacttttatggtcaaggttactacgcttttaagcacgataacaaagaatacacaatcagtttagacatttcggctacctcggaatatgtacgaatttatatatctgatgaaaacaatgaggaattacagcaaagttatgaacaagaaacttttatggacttagacagggaaggcgtagaagcatacttgaaagatgaaggaattgagtttactgacttaaaacatgcattgtaaccatataaggcactagggagcttatacaatagagctacaagcttcctagtgtaattataaggtaaacagctataaacgcttagacgagagaatagagggctttacaattaatttaaaaaaagtttcatcttatctattgacaaataacaaaaaactttggtattctatacatgtaagataaataaaacaaatgaaagagagtgttaagaatggaaaataacaaagcgtatgaaagactattgaaagaagtagaactattacagaatgatttaatggatatcgaggactattcagaagaagtatatcaagcttttcaaaaagtaattgacgaattagaatatatacaagcttcctaatgtaattataaggtaaacaccttacacaaaaagtaaacaaaagcatagtaaaacacaaataaaaaaattatatgaaagaggttttcaaccatgacaaaacaatttaaaaacattatcgcaactttaacaatcctagtaatcgctttggcagcagcttcaggaatcgcaacaattaaggcagtagaaaacgcaaatgataaagctatccttgccgaacgtgtggaagctttggaaaaaactttccgataagcaagaatacgatattgcagtaaagtctaatgtaatcggcgcttatctaatcaatcatgaggaagaagcacaaaaggaatataccgaagcttataaagctcacaagccgactctattaaaaaaactaccgtgagtttcacaaataatttaaaaatattttttacaacttaataaacaggaactagaaaagcttttgagaaaacatctcgagggcttttcttttttgcgttttcaaaacgtatgatcagaaaaggcgccatcttaatttatggaatgcttttaaacctagcggtatacacaagcttttctaaagctttctaatggttaaccacccaacttctttcttgaaacgttacgagaagccctctctcacacacataataaagcagtaggcaaaggaatatgcaaagagtattcttaaatgctgttattaatccatcaaaaaggcaaggaaagaaacggaaatgtgagaaagaaatggtaaaagcctattaaacataggatattttttaagaggaatgagagggcgcctaacaatattattccaaagctttttctaaggcgttgtgtgaggggtttttctgaggggtatctaaagggcgtgagcgggcgtaatctcaaggcgaatcttgaaaggcaagtggaaagctttgtggtggatttgttttttattaaaggaaatgagaagcctttgcggaatgctgtagcggcgggcttgtgggagaggtggctcgagaggttgtcggatagctttcagatagactgacactaaacaaggcacacacgaagccatcacgcggcattatagaggcacccgaaaggtgtccgaacgctgtccgcaaggcttacacaacggctagtttacataatacacattatccaaagtagaaagaccctatctcaatgcaatgttaacagcaaagagacagagtctacatcgagtcgcttgtgtgagcgtgtcggacggcgtgacgtgagagcgtcgcagagcactcgcaacgcctctcgaagcgtgaaggaaggcgtagggcgcaggcgtagccacggcgggcgggggtctttgggaagggcagggggtagcttttccgagggcgggcggggcgcgcgactgtccatctcacacagtttttgggaaaagcgacattataagccttccgatttattttttgctaaaaatcccctataaggcgtcccgacacacttcccgacaagctttccgaggccattccgacaagctatccgataagcattccatcaatagacgtccgaaagctttaaagctacctttcctgaaggctcttccttacttccttttaagaatagattccacaaatagagagggcgccgcttgtcggcagccctagaggctttgcctctttctagtggagtattcacacaagcgtttattaagttgtaggatggattaggtaccatttactaagcggtagccaaaccgttagctaaacgaatttttctcaacatccctttaatgcgttctagcatagcttttaacacacctttcttatcgtttcttatagtataccataaaaaaagaggccatgtcaagctccttcaaataattttaaacatatttccaaataaatcctttgtgtgttttgctttctcctcttgcacaagaggctacatgtgatttatcgaatccataacttattacttcactgactgtttggaaagttatctcctcaccagttttaatatttactccttttacaggctttcctttgcttaaacttattttttgtattcctgctaccataatttgaattttctttatttgttacccactctaagttatccactctattatcatgtttaacttcatttaaatgattaatttgaggctttttaaagatgttatttataaaggcgttagctactatcctgtgtactcggtaagttttctggtttcctttcttagtcaacccaaccaataagtatccttttctatcttttcttaatttcattaaagaatttctggagcagttaaatatatctccttggtcagacaccatataaagcccttcataaccttctatatctctccattcaaccatatcctttacctccgcttttaatatactttattatataatagaaaagacgcctgtcaaggcgcctctaacattatttctctaagtcttccttagcttcttcatactctttatgaagcatatcccagattactttaaggataattaagtttcctaaaatccgtccaatagctattgtgacgcttgctccaaacaccaatgtaatgactacaataagcccgaatgcaatcaccaatgctaataaataatataaggatactagtcgaaaagctttccaattcatattaaagttcctccaatgtcttatgtttatctttgttatagcggataaatgcgtacttagtagtttcccaaagtaggtctatcaagaatagcactccaagatagaagaaaagctgttcccaaccagttattaaggatactagccaaagtataccgaagattattccaacagttatcagataagctatgataacggctgccaatataatgcgtttagtaagtttctcagacaatataattcccaactcctttaacaagctctctgcaaagcgtaattttaactgttttatggaagcgtgttgaatggaactctacaggcgtttctgaataagtttcaataatcacgtctttaggcttttttgcgagtaaccatttcaataagactttcagaaagtgttaaaatacctgctttataaggcatataaaagacgtttgcctttcttaataactgctgtggcgagtcgcttacaaagtgcttttcagaagacccttctgatttaatccagtacgtgtattcaggctcttcttgaaggcgtggggaatacccttccttaatctcttgcaaggcattatcaagcatttcctgaatctctttagtatcaactttaatagtagctgttagttgaggcttacttggaattgctttttgaagctctctatactctcttttaaggccattgtactcctcttgtaggcgtcccatttcctgttcccagcgcttgttttgctcctcttctactgtaagcttttgacagacttcttcaaacttcttaccaagtctatcataagcctcttgtctaagcaggctttcttcagcggactcgttggccatttcaatagcttctacttccttctcagaagcaactttaaggcgctcttcaaagccagcttctctaatctttaagaagtctacctctttttgaagctcttcgttagccatctctaacctatctaaggccagttggtagacagcttttctgccagtcaataattcaatctcttgtttaagctctttaataagcttgttttcgtccttcttaaataacatcttatcaatcctttcctaatactccactagtatagcataaaagaggcctgttgtcaagcctctcctaacacttttttaaccatctaacccaaaatcttccatacggcagaatccataaccgttctcatgagcgtaaatgccctcatgatagaggtcacaaagctcttggataacccctttaggtaccccatacttagtggaagctttctccattcgtgtaacctcttctaaaacctctccagtagcatcgtcaaagactaggatgcgcttattgttgtcgtagtagtgtttaaggttatcctcatgtgttaaccattccaagttatctaggttgttattaagcttattgccatccatatggtttacagtaagctcttcccaaccttctattggattgtaagtggaaagcaatacccgatggagtcttttaatattcccatcgcctagtccaatttccgcatatcccctatcatttataaaaggctttagaatcttaccagttaggttattaacgaccttaccagtctttgttatggagtagttagaaaacccattaacaaccttccactcaccctccaaatacttttttgatgggctttttagaagctagtggagaacctttctcaaactctcttccagtataactccacacatgccctgcatacaccttattttttagcacaggcattgcggacacttgttgaatacttccctaaatccttagaagcagcataggcgcttctgtaaactgtttctaaacctgtctcaacgtctactgatttaacctcttttataagcttcactaaaaaccctcctaagtcctcttctataagcatattgtagcacctttcaggcgccttgtcaatatcctttatgttacatttgtgttacaaacattaaatttactttacagttataaaatattccatcaaatagtgagactaatttaaagcatgtgggaaatactgtcatattagttaagagttagttagcgaagctactaacgagcgttactccagcgagttagtaaatcacttgacctttcctaaaagcttcctgaaacgttctcctaagccttcctaaagctttgagacgtctaggttacaggtcggggatggagtcagttgttaattactttaaggacgagtttgtagaaagcttattaaatcgtatggcctcacctaatgcaaagtgccagcagcgacctttagtaggcttcctagagactcgttttaatatgtaataagaaaagccttcagggtagcttcccgaaggccttctttatgctctatttataggcttccataattccatcaatgaagttacattcgtcccagtcttcagaacgttcttggatagcttctaaaaggcggataaactcacttttttggaatcatgtctgaaggattagccaaaggaatttcatcctctatgataatgtctttcacaaggcctttgatagattcaatgcctctaatgaaacccgcatcccaaccttttccgaattttgaattattcgcaggactggttgtatttaattcatttttggtcttttcaatgtaatttaatactactgtggcatcgataagcttcataaaatcactcctttaccttttggaatagcttggatagcgcctttcaacaaggcttgaatctcagaggcatcatagaagtcctcagaagcctctaggagagcttctaaaacgtctttggtataattgttaggcaaggtgttaataggcgttacagagcttcctgtaaaggattctgctacaatgtttccatcgacagctaatttaataggctctggtgaatcctcttccttagctaccgataaagctgctttaatttcgtccatacaagtttctacagcgtcctgataaccctcatcgtaatcatcttctgggtattccaatttgttttttcatagtggttaataaagcttctccatcgattagtttcattaagcttcctccttaacagtttcaataaagaccttcaaacgaggtgggtggaatccactaatagctgtgtcgaagtcttcgtccaacatcactactggaaagcttcggaaacccactaatctaagcatctccacagtctctgtatcattgcggacgtccacaaacacttcatcaaagcttacacctgcttcggtaagcactcgtttagtcattttgcaagctgcacatgcgtctttagtatatactttaatacggttcattcccattcctccatgctttcaataatctcttcaagctcttctacacgttctgaaagcgtgtcaacttcttcggtaagctcttccacagtttcttcagagcttccaagctcgttctccaagtcgtatacctgtccttctaagtcttcaatttctctttcaaggctataaatctcctcgttcaagtcttcttttttcccatacaacactagtaaggcgctcttctgcatactctaattcctgttcagcaatcagcttatcccaattggaatccaccaaggcattttgaagctttcctacaagctcaattaaagctgtttcacgttgcgttaatgtaggctttgaacaagcctctttcaattctttctcaaaaggtagtttgctcatattaaaactctccaatctcttcttgtttaaactcttcaacagtaatttcttgcattaaacattatcctcccacttcttatcttccttagccaagtattgcttagcttcagtaaatagttctgaaagtacctctaaagaattagtaaggttatcgatggcttcagtaacttcttctacagcagcctcgaactcagattcggtaacgtcagaaacctttgcactaagcattcctgtcagattgtagacagtcgtttcgacatttgcttggtctccttctaaatacccaatctctaaaaagttatagtagttatctaattcaatgccttccattattccttacctccagactccaactcttcagtaatcttctgctgctttctaatggttcctaaatattccataagctgcttttcgtcttcttctgcttcgtcagaaacgatattctcaataagctcgtgatattcttgaaccttttgggaaagcttctcaatatcttctgcatactggttagcgattaattcatgagccttctttgaaaagctattattaagctcgaagtctgcggcagcttttcgtactgtaccaagcttctctaaatactgctgataactcttgatggagtacatcttaattgctctcatctttattcctccttaaatgcctgtgtaaggcgttctaatgtgttcaggtataattaccctagaagctattcaaaagctctcagagagcttcctgtggcttttaaggtatgctttagcgcctgtttgtcttttacataaataactataacatggttgtcttgaaatgtcaagcacttttttcacaataaattaaaaaaatgtgacaaaaaagagccagataaggtctaatctaagaggctcttaaacgagcttgaataaatactccagaaaggaggaagcacttatggtaagaattggaaacagagagttggaagaacgtcaacgcaagtatttaactacttctaaggagccagatgaatacgagggagttgacttaactacattaaaacctaaaatgaaacgctttgcgagacattatatgcaaactatgaatatcgctgaaagctgccgttccgtaggctataatgaaagctcaggttatcgtgtgttaaaacgcgaggatgtgaaggcttatttacaatggcttgtttcagagaatgctgacgcagctattatgagtccaacacaggtattagaagagcttactaatatcgctttacgaaacagctctgattacacggttactgtaaaaggagatgtcgtagagaaacctattgatacaagcgttcaattaagcgcactaaatagcttggctaaattccatgacttattagcccctgatgtcaaggtagaacagtctcttaatatcgtggtagacattgctgacgacgttccaaatgaagctgaagaggttgaggaagaagagtttgtagaaggagactttaccgaagttgaagaagaggatagtgacgtaagttatgacttcctttctggatttttaaggaaggagataccaatgccatttgaagagagtaacttagaggttatcgtcaacgaccttattaaagacgttaacactcatgccaaccagattgcttctattcagtcagacctaaatagaatgacaacagacatttcaagcgttcgtgacttgcttatcaaaaaacactgagcgttcggacgttctaatcggccacatcaaaggccagtctgacgaaatgcttaaactactcactgaggagcgtcgtagacaaacggaaagctaccttgctgatgaagcttcagaccgcaagaataaagagtttagtcaaaagcagatgtgggctgtggccactgctcttgtcacaggagtagggtcagctttagtgaccattgttaagctaatcatgagctaattgaaaggaggtgcattaatggacgtagtaatttctatcgcagttgttttaggtggcgttaccacaggcttagttaacttagttaagtctatggatgtagtctctcctaaatacttaccgctagtttctctagctatcggaatggtgtttgggttagctatgtcaccacttcttggaatcacattatatgtaggtgctattagcggacttgtagcagggctttccgcaatgggattctacgagttgacaaagactccagcagaataaccttcacacggccttgagggagtttccttgaggcctttacataattttaaggaggacacacaatggctgaaccaataaaattaaccataaccaaaagaacatttaatgaagcctatttaccatacatgtacaaccagcctgaaggacaacatagaacaatggtatttttacggaggagctgggtcaggcaagtctaagttcgttgtacaaaacgctattctaaaaggcctatcagaaagacgtaagttcctcgttcttcggaaggttgacaacactattcgtgactccatcttccaagagtttctagtctgcttagaggaatggaatctgctagacttttgtgaggtaaaagcttcatacatgacaataaagctgcctaacaaaactgaatacatcttcaaaggtttagaagaccctgagcgaatcaagtctatccaaggtcttacagacatcattatggaggaagcaacagagtttacacgagaggattacgaccaacttcaaacacgtttacggcaccctacagcacggcatcaacaagtatttgtaatgtataaccccgcctctaaagacaactgggtttatcaatacttccacaaccctgccactaagcgtcctaaaggctctaaggtaatctgtacgacatacaaggataatagattccttcctaaagcttacctagaccatttacaagacttgaagaacactaatccagtctattatgaaatctacgctctcggtaagttcgcaagcttaggtaaacgcatttacacaaactggaagatagactccgagttcaagcctaaccaactagttaaacaaggatatgaaccacgcttcgggttggattttggtttaagtatgtagaccacttagctagtaatagcttcgattaaacttcgtgaacgcttaataaagcggtgttaagtaactacttagctaacagggaaagtctaagggcaaaaagcctatgataatcctgtgcctagcccttaggggaaggtgcaacgactaaattctcaagtagcacttgtcgagaggacatgtgtaagaactgagtaagaggaagtcttgagataggcttccgtagtgcgaaggctcttaagtaacgctgagagtatgatatagtctagtcccttttaaatatcgggaaaccgagggtatagccgtcactaacgaccctaccgtaatcctttctacactagtatctgaagcagaccgtgtaatttatatattcgacgagtttgttaaaactggtatgatagctcctgagatattcgatgtgattaagcgtaagaagcttaccaaccagcttatctatgctgactctgctaaccttgaaaccatcgagcagattaaacgcttaggggcacgcaagattaagcctgttaagaaaggccgtaacacagtccttcatggaatccaatatctacaaggctatacaatctacgttcatcctcgctgtgttcacacgattaaagagcttgagaactacgagtggaaacctgctaaaggctctgacgactacgagaacaagcctaagcaaaatggctttgaccactgtatggatgccttacgatatgctgtcaacgacctcattccacgtaacagaataagaaccattaacaagtcggtactaggcctataagacgtctagtatctgtcttgggtacaagtatcagcgaaaaatataaggaggattctatatggcaatcccaaacggacaaattaacgctggtgatataatcactactaacatcagacgtaaacatttcattagacgcaactatgatattcgagaattagtaacccttgccgaaatgcactctcgttcttcaagcgcctatggagtattgtacgactattacaaaggcaatcacattgctatccaatcacgtactttcgacgacactaacaaacctaactctaaaatcgttcataacttccctaaactattggtagacacttccacagcttacttagctggtgaaccaattacggaatcaggcgatgagaaaactatcaaagccatgcaaccagttatgaaagagaactatgtaacagatgttaactcagaggagattaagctctcaggaatcttcggtcactgtttcgaaatccattggattgaccgtaacaacaagcatcgcttcaaagctgtttctccaatgaactgtttaattgcttactcagcagaccttgacgaagagccattagcagccatctattacaatactgttatcagtgatattacaggacacgtaattagaacttatgagatttacactgaggataagattcttaaattctctaccgacgacgagagagacgtctacaaagagattccagaagtgttggacattagaggttatgaagaacatcctaacctacttaaaaagttccctgtattagaaatcattgctaacgaagaacgcttaggtgactttgaagctcaactatctttaatcgatgcttacaacctagctgtttctgacagtgttaacgacattgcttattggaatgacgcttacttatggctacaaggatttgaccttagcgcagacagcgattcaattagcaacatgaagaatgatagagtaattgtaacagatgatactggtaatgtcaagttcattacgaaagatgttaacgacaagcatatcgaaaacattaagaaccgtgctaagctagacatcttcagcctatcacaaacgcctgacttggtttctaaagacttcaccgcagcttcaggacaagctttgaaagcagctacgcaaccgcttgagaataaatcagctgttaaagaatctaagttccgcaaagtattagctaagcgttatgaacttatctgtagttaccttgagctaatgagcaaagagaaagacttgaaaccaaatgaagtaacacctgtctttgtacgtaacttaccacaatcttacgcagagttagctgacatggctgttaaacttcgtgacatgcttcctgacgaaactatcattaatcagttcccatggattactgacgctcgactagaagtagagaaagcggatgaacaacgtcagaaacgagcagacatcgccttgcagaacttcaaacagactagcgctgtacaaggagcctcaacggcagctgctaacaagttagataagaaccctgctaacacatctactatcacaactactgacccagtggctgcgaaggaacaagagaaagctatccaaaagaaacctaagactgactaggaggaataacaatggcacgcaagaaggataaagagaaacgtcaacaggaaattgaagacgccttagttgctctcatgaccgctcagaaccacaagtaccatagattcactgaccgcttcactgtccttcttgatggctttgttaatgagcttatagtaaacctagctgaccctaagttggatgcttttgcaatccttcaggtgagtcagtatgaggctatcagaaagcttcaagcagcattgatagactatcaagaagagttcagggagatgcttttagagagcatgtcagacaccttagaagagactttgggacagctttttccaaataaggctataccttcagcgacagataatgcctacatcgaacaagttattgcagaggcttacgactactttgaagaaatcttcttgcaattattagtagagattgaggccatcgctgttggaactattccatcaacagaggacatcgtaaccactatccaaaagcttcgagatagattgtcctacacactacgtcgacacattgaagctcaaatgtcggcagtaattaacctcgctgttatcgaagcttctaaacagtatgagattgaattatggaaatggtgcatccgtccagagcttactgaaagcggtacttgtgcagattgccgagagcttgctgaaggaggtattggtaatgagggtctatataccctagccaccatgcctttgctacctagacatccacactgtgtttgcatcctaattccatacgtcttatagagcggtaatgttaaagggcgctcaagaggaaaagaactttacacaaactaatctaaacgcacgcacagggcttaattgaactgtggagggcagaaggagaatcttatattatgaatccagaagaacaaggacaaggacaacaagttgatttgacaccagaggttatcgttggagctattgaatctaatccagaattagcacaagctatccaacctcacgtcttaacgaaagacgcagtatctagtttcttaaagacagacgaaggtcttggcgtagtagcccctatgattgaccaaagcgtttctaaaggcattaacgcttggaaagaaaagaacttagagaatatcgttcaagagcgattggctgagttaaaccctgctgaaacacctgagcaaaagcaattgaaacaaatgcaagctcaaatggcagctattcaaaaaagataagcaaatgttggaaatgcgtggagtagctcaagaagctttagcaaaagctgggttgcctgcctcattagctgggtacgttttatcagacaatcccgaagccgttaagcacaaggtttcagaattagatattgaaatccagaatatcgtttcaggactagttgaccagaaggttgctggaatcgcagctaaagcagctccaacaaactcagacgacatgtcaagcattggcggttctaaaactgtagaacggttaacagatttaactgttgaagaagcgacagaactagctcgaactaaccctgctaaatatcgccagttggttcaacgtggttaacaacagataatcatataaactataaacatatagaggagactattaaatatggcacatgaagtaactaaaattgcagacttaattaaccccgaggtaattggtgcgttccttcaccagaaaatgttagacaacttagtattggctccatttgcagaaattgaccgtactttacaaggccgccccggcgacactttaacattaccacaatggaacttcatcggtttagctgaagacttagcggaaggcgaagaattacaatctgttaagttaactgctgaagaccgtaaagcaactgttaaaaaaggttgctaaatcagttacgttaactgacgaagctgtattaaacgcttatgtacgtccagtcgatgaaactgttcgtcaattagctatggcaatcgctggtaaaattgataacgacttgttcgctgctatgcgtgcattaactccatcagacgttgagattacagatagctacgaatgggtattagacgctcaagttgctttcggtgaagagtttgacgaagaaacttacttattcatctctcctaaacgtcgtgcgacaatcttgaaatctaaagacttcgtacacattcaacaaggcgtttcagttatcaaaggccacttaggtgaaatctacggaatgaacattgtagtttctaacaagattggtgaaaacgaagcgttcgtattgaaacgtggagctttaacattgttaatgaaacgtgactacatggttgaagaagtacgtgaaggtatgaaacgtcaaactaacatcactgctgaccaacactacgtagcattcgttaaagatgctaaacgtgcaatcttcatcaacaaggtagctgcgggaaagtagcagcccccaagaatcttcaatctagcggggttactgaggactcagttactctgacttgggaagacggaggggcaagcctctagtaagctaaacgagaggttgcggaaatgttccgtagcctcttttactttatcacacaacaggaggaaaagcaatggcaaagacttataatatttaccaagatgaagtgaaggttcaggaaggcgtagcagagcttacgaaaaccattacaggacttactccaaacacttcatacaagtttgaggtgacagctgtcgaggaaggcgttgagagtgctaagtcaactgccgttacagctaagactaatccacgtaaagtggctacagtaacggcttctcaaaagactatgtctctagcttctgacggaagcaaagcactgactttcacagtggctccagaagacgctactaacaaagaattagaaatcactaacagcaaccctgagtttgctacttatgcagacggtacagtaacagctgttgtagcaggtactacaactatcacagcaactgctaaagatggttcaggcgctactgcaaactgtgttgtaactgttcaggcaccagcttaataaactatcccaaggaggctgaggcgaatcgccttggtcttcttttaaggaggaagctaaatggaactaattgagaacacggagttgttcaagtcgtttgaagacgttaccctaccgcctgaaacagaagctattgacatcaccgacttaaagcttatgctaggctacggtaacagcactatccgagacaatgttctgaaggttttgaagaagcgtgctagacagcatatctgcttattcattaacaaggaagttacagactttccgatggagttggactacattgctgacgagcttactgcaagccgtatgtcacagcttaactcagaaggcttgaaaacagagtctactgacatcactcgttacgactataaagacgacatctatgcaaactggtatggcattcttaaccgctggttagaacagcaaggagagtatcgcaacaaggcattcttcatgctttaagaaaggagcttacaaatgcgttataacgacattgtggatttaatccaattcaatgattgggaagaccctgacgacgactacggaacaatctcttataagactcgtggaacaatcgttgttaaagaccttcctgtaagcgtaggctccctacgagttcaaggaaagctattgcaaaaccaagaccaacagtgggagaaacgctacttgatacagcataaagtattcgagttaaagaaccttcgggtagacgctgtccgacgccactccacaggagagattctaaatgtctattgggataacactactggaacagaccagacagtttcttataaggttgagtacagagacatccgaagagacaaggaggacggagttatatggcagggttcttagaaataactaaacgaatcgatttcgcaggcttagagagagagtttgttaatgaagtgaaaggtgttgtcgaaaagaactccgcacagatggccacagctgttagattaaatatcgtccgtagaggtaacatagacacaggaacttactacgatggaataaagtctaagacggaagtagaagggaagggtaaaagcgttacaggaattgtagagtcagacgtttcaggaaacccttatggacacagaggttacgctgtttacctagaggaaggaacttaccgacatcaagcattccctaactttacagacgctttagaagagtattctgatattcttgtcgagcagcttagcagaatcaaagtgtaggaggaattatcaatgagcaatagaccacctttccgagcaagaagttcctctgtagctttgcaaagagctatcgtaaaggaaattagagcacaaggaatcaatgtctgggacggaactaataagtttccagaatatccattcattaagattggtgaggagctaacttcaggtagaacaatctctaaggatgctatcgggaagatgcacaacctaacccttcacatatggagtgactacgacagctcttttgaagttaagagtctaaccgactttcttgtagacttacttatcaactctcctcttaacttagaggacggcttctgtattggagagaaatccctcgaccacgttcgttacacagaagctgcaaacggaacttataaaaacgagcgtgcatatctattcttagacttcgaggtaatcgactctacgatagagccataataacacacataaaggagactgacaaatggaagcatgtaaatctagctacattcgtggtacagcagtattaattgaggttcagaatgaccttggcgaatggattaaagtagcagcacaacgaggcggtacattaaaccgtacagcggcaaccttagacgtatctaacaaagaaggattcggatgggacgatgcagaagcaggtaacaagtcttggtcaattgactgtgacggattgttcgtagaggataacgctggtttccaagcattgaacgcagcttgggttaatggagactgtgtacgtgttcgtgttaaatttcctagtggattaacttatgtaggacaagcaatcttaactgacttcccttatgagtttggttacgaagatgctgtgacttactcattaacattccaaggtaaaggcgctttagaagagcaacaagtagctcctacaatcttacctaagaaagttgagttcacaaacgaaactaaggaagttaaagttggagaaactcttcaagctacaattaaattcactcctgaaaatgtttctgaccaatcggtaacttatactgccttgactccagctttagcaacaattgatgaatctggtttaatcacaggcgttaaagaaggtactgcatcattcaacgttcgctcaaatgtcaacacagctgtttcagcattgattgatattgaggtaaagcccgcggggtagtagaagccccgaccgagctttcggcaagtagcgttagcgaagactcagtaacattaacttggaaatagactgcacaaagggggggggcttgggataaattcccttgccctctttttacataacaaatataaaggagattacaacatgattattagatttcaaggcaaagaccttaacctacgattaacatacaagtctatccactttctggagttagcctttgaccaagactacgcttcattcattgctgagcaaacgcctttcaaccagtccttatacatcttctgggcaatgcttcagaacgagtctgattacgaaggagtatccgtactagatgtggcagagcttctccaagactctctggatagctatgagtttaccttagaagaatacttcgagaaagttaacagctcgtatgcttctagtattctagttaaacagctattcaaaaaacaacactggctcgttacccagaggaggcggaagacgaggacgagcttccgaagctagacgtaagatactttatggtgttgtgttcagacttaggaataccttccagcgacttttggacaagtacaccatatgagtttaatggaatgttacgaggagcttaccaaagacaatcaagagaagcttcgttattcctttctctagtgcaatctaagaagcctgttaaattagagaagtatcaaggctttgaattagttaacgaaacaaacaaacctaagactactagggacatggcggaaacaatggatgaacttgatagagcagcctttaaagaggaagagctatctaacctgttcgactactttgactaggaggaaatttaaatggcagataaggaaatgcgaattaaggttagggtagacaactctgactatgcaagtaaaatgaaagatatggaaggcactcagtcacgcttaggtaaaagcactgagcagactacaggaatcttcggtaagttcttcaacaagttaaatggtggggcgagcttagctaacagctctatgctaggacttggtaaaagctttctgtcaaccagtgttggattcggtactctaacggccgctgctactcctatggcagctgctgtaatgggtgctgctgaagctactaaagttgcaggacgctttgcgatggattccatcaaggactatgctaactttgaaggaacccttaaacaagtacagattattgcaggcggtacacaggctgacatggatatgcttggagacacggctattgaaatcggtggtaagacttctaaaggtgctcaagaagttgccgaagccatggttgactttgctaagctaggttttacagctaaggaaacttcagaggctatgaaaggtatcgtatacgctgcagaagcttctggctcaggtgtacaagaaactgctggaatcgtagctacagcccttaacgtatggaaccttaaagctacagaagcagaacacgttgccgatgtcttggctaagaccgctaacgaaacggctgctgacatgcaggacatgggatacgttttacaatatgctggttcatcagcttccctagcaggagcttctctggaagacctttcagctatggcaggtatcatggccgacaacggtattaaaggttctaaagctggtacctctttacgtacagctttcacaaaccttatcaatccaacagacggtgcggccgctgctatggaaagcttaggagtacagtttaaagacgctgaaggtaaggcacgtcctacgatggatgttatctacgatttacaagacgctgttaaaggcatggatgatattcaaatccaagagctttcaacaatcctgttcggaaagcccggggctgctggtatgtcgttcgtccttaaatctaccaaagagcaagtacaagacttatcaaaagcattagtagactctactggtacagctgctaaacaagctgccgctatgcgtgagactatggcaggtcaattagaccaactaggagactctgtggacgctatcaaattaaaaattggtagagcgtttaccgacatgtttgcactagacgctgttaaaggattcaacaaggctcttgatggagtcgatgaaggattatcaaactttggtaaaggtttcaagcgtacaagcgacttattggaaacatctaatggattaatctctggtactaaggatgccaacaagtttgttgaagctgttcgagatgcaggtactaaccttactaacattcctttccaagagtctttagcacagtctcaagtgtggggaattggaatctctaaacgtgcttacgaaaccaatgaggttatgtatcagcttaacaaaagtattcaagagttcagcttcctcccagatgattgggaaggtaagtggggacaggcttcaacaatccttaaagattcagtaggtcaaatggagttgaaacttgcttcagcagcggctaaaggtaagcatggggggagaagctgatatttcaggtatcatgaatcagactatccaagagaatctacctgctttgcaaacagctttggatgaacaagtagcagtattcggaacagctaaccaaagccgattagacgccttgcagacattcttcactaacgagaagactttaactgacgagcagaaatctattatgatacaaggtgagctaactcatggccaacagctttccgataccattcaaactaataacaacaagattttagaattgtatcaaagcatgggtcaacaggattatgcacagcgtcaagaaactggcgccgctataaatgccctgcaacaacagaactctgaaatcctgcaaaacatcgctacaactgagtcaagtagtattgttgaaacacttagagcgcaggctagtagcactgggacaattactcaacaaatggccaatgactctatcgcggcagctaaccaacagtattctgaaactgtagcagcagcctctaaacaatacgttgaaactgtcagctcaattaaccacatgtcagatgaatctatagcagctgctggaacaactagagatgagcttatcgaaaaggcacgtcaacaaatggtcggaacagtagaccatgctaagactcagaaagagcagacagtaggagaaattcaaaagattgccgacaagtctgaggaagttgacggaacgcatattcaaatcaatgctgacgctgatactacaagtgccatggaagagctcggtcaattagctgctagaattaacgacgtattcagagcttttggagaaactgctggaaagattcaaggtggtattgatggatttgaaagtaagcttaaacaggctgataattggatagctggaaaggttggaggaatcttcaaggctcgtggaggacttacttcaggcgttggttacggaatcggcggaggcaatgcccaatactctccaatggctaccgcagtaggtgtcggaacacagttaggacagggcggtatcaatcagggcgtaatccataacgagcgaggaagagaagttacaatgcctatccaaaacgctacttacatgagacctttcgcagcagctgtggccaatgagcttcaagcaatgggaggcggactaggtggcggaggcgttcaagaagttatcgttccattgtacattaacgatagagaatttgcaagagccactaacaaagctatgacagaggagcagcaacgtgtcaaacgtatcgctaaccgagctgtcggcaaaaaagtaaaggagacgtttaaatgacatgttctaataaacctaattacactccgtttaaattacaaggtctagcccctactaaacagtggggcttaggccgttctgctagttatgaacggtttaacccaaacgagtttcacgccttggaggacgaggttaagattactttcccagtagactttagaggaaaggttaaaggaaactctaacccaaacccttcacgaggatttagccacgccagccaaatctaccgtgagaatgttttaagaggaagtcagttcctatctaagccttcattactatttaatggagcagtatataacgagaagacagtctacaatggagctatggttgcttctactcaagaggttaaccaaggcttgatgttctattgggaagactttatcaaccctgacccaagaattaaagaaggtgacatggtaactttctcagtagatgtccgaagcactggtgaagatattccaacaggagctgtggccttcaaagggacttctaactttgaggaatactataaagtccttgaacaacctatcacaaaagagtttactcgaatctcattcacaactcgtttcctatctaaggactgggaatgggacgaagcctttggaatgttctggggagcagagaatgttcctgttacagattacccaatgtttcaatatgacaaggataagttagttggttttattcaggctcaagaaagtgttcaactagagttctcacggccgatggtttcaactatcggaaagactgcttacattgagtctggggacgacatgttctctaacaacaaatgggactggtctaaagccgtatctaaaggtcgtttaaatgaatttgatggtaagtataacacaaacggaatcaaacaagactgggcaatgcctgagttcattcctattttcaaaggctctgagagaatccacttctacaaaaagactaccttaacagaaacaactgacgctggacatggctatggtaaaatcctattctacagcgctgctaacgaagattcttatatgaacgtatataagaagttccctcacgaggctggcgtatatggtggatacgctgctgaagtagaagtgcctattggagctactcactaccgtgttcatataacttcagaaagaggaagtgccactacagaagcctatgtacaatcttctgctaacgactggtcagagtttagccaagagtggtacgatggactgtcaggaaagctagatggaaagactgccagagctgagacgttctaccgtaaagaaatggttgagatggagtttgagctgcactttgcggaagctgtacagaaagctttgccaaacatcttcaaagaccttactactgacgctgagaagcaacaaagacttcgtgacattgcttatcaattcgattcaacaatgattgcacgaggacgtggacaaggcaataacctagctgactggattttctatcggtgggcacctgacggctctattgaagaacaaacaatgaagcagtttagaggagagggattaacttcagttacccatccatctagctaccaagaatggattaatccacagggtagaattgtcacatcgctacgctctaatcgaatcattcctaactcaatgtacatgggaacagatacgttaagtggtaagtacgaccctaaattaacaacgcttcagctggaagttaatggagagcttgtcgataagaaggccgctttagataaaacttctgaagtgtttacatttacaggtcttaaaggattcctaaaaccagaggacaaggttagaatcgctgggtggaataaccgtaacaaccagtggtcaatcacttactctaatgttcttatgggaaacactccagaaaacattgcagagtttaacgagcgtgcctttgttgaggcggattaccttgttacaaacatgtcagtaatcgtaactcaatctcaaatggacgagtggggatttaatcctaacttaccagattatcggatagagtcactagaacgtcctgcaagtcgtacagaagagtacatgataaactctatggtacaggtaacacatgcctatgatatttacggatttatcgaaagcaactaccctgagttttacggagactgctacacgttcgatgacagaattagaaagataaacgaacgaatcaaacagtttaacattgtggctaccacctattcagaagagccttgggaagacggagaccctaccatctacatttgtgctgaggctagaaacccagatagagactacaatgtaacttctgaaataaatcaaacagtagagcttcaaattaacaattctaagggacactttatccatcctaatggttatatctacgtaggattcgctaggatgcctagaagcgaccgagagacaggaatctcagtggagtctgaattaagctttgactttacgatggacagacagtatgacagccttccaagagtcttccgatacaactatcagaagcagccttggttcttgtttgtaagaaacattaacagaagcgttcttgcccctaaagtaaacactctaactcctattaacggaggtactagacgctataactttggagctaccgaagacgctcggtatatctcaatggactgctttatcaaagctcctgctgaagaggatatgcctaagttgatggaagagcttgctgacttcctagacgttggagaaacggtaatccaattctctgataacaaagaccgctactacaaagtgattctggatggttcaacagacctttcccaaacacttcacgtaggtacgttgacactgactttcgtattgcttgagaatacagctattggcgaagaggttgtggaaagctttgacatagacagcacgacaggttcagttccattcattgagcttgagaacatgggtacggcggacgcttaccctacctaccaactgacctttgaagagcctgtaggatatgttgacctaatcggtacagatacctcagccaacgtgtcaattggaagacgtcctaaagatactgaagacgaggttaaagtagaccttcgtcctcgtaagttctatagtaagtttacatctactgatggagctggatggacggctatgaatgatactcaacttcctcagattgaagggtactcaactaagcttcaaggaactgtccaaagagttaatggaatggccaatcaagacaagtggaattacggagacactagccacagaggatggcatggagctggtatcgtagctaaccttcaaaagaaccttgacgacttctatatggaagcctctatcgtagctacaggaaagccagttaaaacttctgctaatgctattttcttgatattctatgacgaaaacaacaacccatatgcttacactaaggttggtacacggcctcaagagggtaacttagacagctacgtagcttacgcaggtgactggggtaaacgtaaagtagttaacaatggagctaagtggaaagacttctggggtaaggtttctgtacagcgcagagataaccgatggagacttattgtaggtcaatacaaagaccgtagatacagtccttcacctgaagcttcattcaactttggtcagaacatgttgaaagacacaagagacacaggatggttcgacttgcctcctgaaacttggggtaagaagtttgcaagggttgggatattcttcggacagtattcacatagacctaaactaggccacctttcagtgcgtagattagtcgtgtgggaaaaccttgaggaatacggagaaaaacctttagaaggaactccaatcctattccacgaaggtgacactgtagtaattgactcaagcaaagctcaagcatatcttaatggagaacttactccatcgctagtagacccaatgactgactggttccctataaccaaaggtgacaactacattggaataaacaacttcaaaggtaagcttgacatagtatataacgaacgatttaaataaggaggaaaaagtatgattacagtattaaacgcaaacggacaaacagtagcacactttgtcaacaacgttagcgaaggagtaccatactttgagcctactttgacggagaatatagagacgttggtatcaacgttctctttctctgttcctttagactgtgacgaaagccagtatctaaaaggcttgaataaagtattagtaaaggataaggacggagatttaagacagtttaatatcattcatacggaagaggttttccaagaagttgactcacgtattctagtggagtgtgaagacttctcaattagcgaaatgaatgacactgtaatctatcctttcaatgggcacaacttaggagacactttaacaaaagccgtaaaaggaactggttggggaatcgagtattctgcggacacttggcaagaaggagaagagcctttcatactagctgagtatacgaacatgcgagaagtgtttggaaacattcagaagacgtatgacgtagactttaaatttacagctgagagaacagccttcaaccaaactaaacggattgtcaaagtgtataaaaaacagaggtcttcaaacaggccgttacttcacctatgacagagacgttttgggaatcactcgtgacgtgcagtacaatacaatcaaaacagccatcctaccttactacacaggagttgatggaaaagtatggacgcttaaaggaatggttcctgttaaccctattgaaggcattaccaaagataaggaaagccctttggtagtccacaatcaagctcatgcagactatgacgaacctttcttcttcaaagcaatgcctttcaaagcttcatcaacaaaccctgagcaagtatatcgacaaggtgtagaagagcttttaaaacacattgccccaatctatacttacactgttaatgtaatccttctaaatcgtgtccaaggatgggaaggggaaaccttagcactcggtgatacagtatggatgaaagagcgtgtaggctctcgtgaaattggtctggaagcacgtgttattgaatacatttatcacgaagacgacccaagccttgatgaagtaacctttactaacttccgtgaaattgacacttacgacacctctgatattgcaggtatccgagacgctttgaacgaccttaaagaccaagtggattctaacacagttattatagaaactactagagagcagattagtaagcttgaagaaggtcagtcaggtatcattgaagacttaggaaacaagaactcaataagcattggtgacacgcctaagccaaaccctattgacggtgacacatggttctctacacgtgttaacgaagctggccaaacaatccatgagattaaagtttgggacggcgttgagaaggtatggaagctttcaatggatacctctaaagccttcgaagcagaggatactgctaaggctgctcagaaagacgctgaggaatctcttgataaggctaaccaagctgtagctgatgctgacactgctaagacagctgctcaagaagctttggatagatacaacaaccttatgataagcggccgaaaccttgcgctaaactctcagaagattactgtaccagacgtagtagcaggaacgacaactcgtaggaaaactattccgctatctattccaactaagttaggcacagagtataaactgaagtttaagtataagcttactgaaggtactctaccagaaggtatcacagttggtatctataacgttcctaagcttgcatgggcttctaatatagttactatccctactgaaggcaaagatgaaggagagctgttcgcagagcttactaccaatgctactgaaggagacgtcttgcttatctatcaaggagttagaagtgctgttaagaatgatgataactttgactttacagaagtctaccttgtagaaggcgataagataggagattggcaaccagctccagaagacgctatcgcaagcattacgaacatcaacggtgaaatcacttccctagtgactaagacagatggattggaaacaagctatagccaaatctcacagacggttgatgaaatccaatttacagtcggtgacaaagctgataagagtcaaatcactcaacttcaagaccagattaacttacgagttgagaaagacgatgtaatcaatcagattaacgtttccacagaaggtattatcattgatggtgcaaaggttcagattacaggtaaaacttacattgaggacgccgttatcacagacgctatgattagtggcttatcagctactaagttaacagcaggtgttattgacgcttctaaaatcaatgtaacaaacattgacgcaagccaaatcaaagcgggtactatccaaggtattgacataatcggttctaagattactaacccatttgaaataggctcagaaggatatacactagctggtcaaactgttatggaaagagcgcaggttaaaattgactacagcgtttcagaaactggtcaaaaaaggttggtcaatacttcatgcaagaggtattcaaaatcagctacttaacctagacggtactattaactcgttttcatctcttgcttcagatggattatctattcaagattctttaggaaacagtggttacttatcagccgagttgctaatgcagttctctaacactggtaagaagatttaccccggaaattcatgggtaactaacactgatagaattgtaccctcattgacaatgaacaaatgtgctattggatggctgttcttatggcaaccttacgatactactggtggtaagccttatacatgggactatacttactatttagttcctaaagctcatgctaactttaacagtggtaaaggtattaatatgcggctacaaggcgcaggtaaaggtggaggagcagatgatactgtgtataagtatgtatacgtatctaatgactctataacaggaacggtcaataacggtactggtaatggagctaaatgggttcttaccggcgtattttcagtttaaaggagggattattttgagagtttggattgaggataaggtaggattattgacaggatattcaacagagcctttggaaggctataaatgtgtcaatattgacccttcagagtctttagaaatgcttggaggaatgcttgactttcataactattactatgatggtgagaaagtatatagagacactaacaacgactttcagaagttcttagaagaggaagcaaacaagcctcctgaaccttctaaagaagaaatggaagaaagacttgctaagttagaggcacttttagcagacttgctataaagcttctgggtgggtagtgggaataattttagaaaggagattcatacatggttaaattaaatgatgtacttagctatgtcaacggacttgtcggaaaaggcgtggacgctgatggatggtatggtactcaatgtatggacttgacagtagacgttatgcaacgcttcttcggatggcgcccgtacggtaatgcaattgccttggttgaccagcctatcccagcaggcttccaaagaatccgtaccacaagctctacacaaatcaaagctggtgacgttatgatatggggcttaggatactatgctcaatacggtcacacaggaattgcaacggaggatggaagagctgacggaacctttgtcagtgttgaccaaaactggattaacccaagccttgaagtaggcagtccagcagctgctatccaccacaatatggatggtgtctggggagttatccgaccaccttacgaggctgaatcaaagcctaaaccacctgcaccaaaaccagataaaccaaatctaggacaatttaaaggagacgatgatattatgttcatctattacaagaagactaagcaaggaagcactgaacaatggttcgttattggaggcaaacgtatctaccttccaacaatgacttatgtaaacgaggctaacgaccttatcaaacgctatggcggaaacactaatgtaacaacctataactacgataactttggattggcaatgatggagaaagcttatccacaagttaagttataagcctataagaaaagccccttggaaggttactccaaagggctttttattttacatctcaaagcattgtttaagcttttctaaagctactctataagctagcctcatgccttcacaaaagtctgaatcctcttgttcatattgttctaaacgcctattcaaaaaacatgacaacctcggccaccttctccttgttaatggagtctacagcctgcttatgcgaatcttctttaagctttgccatgtcctttaaccgcttagtaatatcactagcgaagtcctcataatacttgtcaaaatcaccttcaataaatgatactggaatcattccaacagttatatcagaaggttctctataggcgctaacagtcacctcgaaaggctctgtcggaaggttacctatagttatcttagaacagtctttggtatctcttaaatagacatgtggtacgtccaacttgataaagttatcattacgatagtttaaaataggtcaacaacctcctctaaggcgtactcagtttgtggagtagcctctgatactgctttctgctcagcttttttctaaagctacactcatgaatcgctccatgtaaagtagtctagcttggctgtaagaaagcgttgggtaacgtgagtttccgtgataatctttaatggccatctctaagaatatcttcaaggcttctgcaccgaagcgctcaatatccttcttcatgattgctctcaaagtctgtagtgaagcgttgataggaaccttcccaaacttctgttgattaaggtatgcaacatactccataaaggtagtagtattccacatagataggggagcgttcttccaatcctttgtgtcaaccttgttaccatcggcgtctttataaagcttgttctctttagttctaatccatgccatcttaaatgccctcctcaataaattcccacacatagccattatgttgaatataaactcctctacagcattgtgctatagttgattcgtcaaaccctgccctgtgagcagctttcattgaactgaactcaattacgtctccagattttatattggttgctctaacaggtttacttatctttttagttttacgttcaatagctgtaccgtagttagaattatatttatgagtacaccactccaagttactcaccttgttgttttttgggttttcatccttatggttaatgcaaggtaaattaaagttattaggtaaaaaacgcttctgcgacaactctatggacatgcctcctgtttcctctacctaagtttacaactaaatatccattgcctttatcagttaactttaaaattctacctctatgaaatctcgtaaatgagccttttttctgaatacacttccctgtccaaacttctaattcttccaagagaacttacttcatagtgtgattcaaaacctacaacaggtttccaaacttccataataaaacctctccttaaatctttgataaatccatcatagcacatgattggcggattgtcaatacattttgtatagctttcacgaaaaagtttcaaaggcgactgaaaggagtctttaggctgtgagggaactttccgaacacctttacactatactatatgccatagctatccttaaaccataagaccttacggcctttaagttcaagagcagcttcgttaacactcagctacaacctcctaaagtcggttgtgaaactctttagtaaacttctctttctctctttaagacccctaagaccagtatactaaaattaccatttttttgtcaagcgattttgcacaagaacttttgtggagttgttaattgtaaggttgttgaaacatttgtaacaaaactgtaacataaatatttaataagtgttcaaaattacttgactttagctatataatatgctatactaatgaagtagtaaagatgaataaagaacttattaggaggaaattaattatggctaaaggtttagaagcaatcgcacaggcagcgcaagcgcaatcaaaaggttcaggagagcagtctaaaaagacttatcttaaaaagggtcaaagcattcgtgcacgcattccagaagacatcttagaaaacttacacgtaaaccaagtcgtttcagtttttgaaccgcaggtgttaccaacattatcataccatgcagaaggacgtacagacgttcgtgacttgtatcatgaagctactgaaattatgttagcagaccaccgtgctaaagttgaatcaggggaaattgaacgtggttctcaagctgacaaagactcatataaagcagctcgtatcttaactccaaaaccactcatcttattcggtgtaattcctttggcagacttcacacaaggcactaagaaaactaatacttacccagctggggagccaatcttattggaaactaacttaggacgtgacaacgctaatatcgacgccttaacgaacttcttatcaaaagaaactaacgctaagaaattccctaagaaagccttcgagattacttgtgaggcagctaatcgatacactttcacaccgttagacgacgaagatttaacgcctgaagaattagaagtatttaaagctacagaaggcgctacagtccctgaagaagatttcgagaacgcaatctttgaaagcactgttgaacgccaaattgaagacttgaagaaaattggattcgatacaactcgtttaccaaacttacctacagctgctccatctcctagtcaaggcgctgacgaagctggtacagtagacccttcaggaatcgatttctaaaaactatatgaggggcttcggcctctctcctattatagggaggacaaaagaatgaagaaagacaatccacaagttaatccaatcaagtttaccgaagaggattacttccgcctgttacaaacagtcgttatgactaacactttcattggctctctatcagctggctaccaaggtaaggaacgcttagagaagattactaaaatcgctgagaacatgttcgtgctcaatcgtttaatggagtcagccgaaagcaatggagaagactggggagacgagatgttattagactctctatactccgactcagaagttcttgtaactaagtataaacacttgttatcagaagctcaattagaatccataaataactctattaagaactttgcagaatcagctgagaaagctcgcaaagaagcttacgaggaaaaggtagcacaagctgaagttatcgatttcaaaaaaggccaagaagaagcgaggtaagtaatatggaacgcttaatggttgttactaaaatcatcgcagattttttctgggaatagctttgcaccacattccattgagcttgtagacaacttttacgaagacgatttccctgaaggagatatgcttaaagaagctgtgtcagaatcattgtggaacgcagcttatgaaatccttcatacgacaatggcaacggctgataaggttatcgctttagtaactgtatacaacgcctctaatttagaagaatcaacctatgcctacgaagccattcaagacagcgttaataaggctatctgtggcggagctgtggaggacgttaagtggaaacagttcgtgggctctcttgacagtgattataaagagttcttcgagaaggtataagatggattacagcaagtttaaaataggcgacacagtaatgtatcaaggacaactctgcggggcaggtactgttatcaacggcaatacctatactgtcgtacagcttacctcaaagcctcgctatgcctttatcatagatgagcacggcaacaagaagctaatccaaatgggtttcaacttcgctaagataaaagaagcttaaaaagtgttcaaaaacgcttgacaaaggctttaaaatatgctatagtattaaatgtaaggcggcattactatggtttgtcgtaacatagttcgagatgcttctcggctatagcggtctagggctacagattgctcccgcctgcgggctgctgtaataggcagtaaaaaacaatagcaggagtacccacccttgagggcaggagagggcgtagcagaggcggtgacgactgcctcgttcatgcgttgtaagtgtaacggctgcacaatggtctccaaaaccattagagaaggttcgactccttcacagcgtgtttcggggagtatcataattggaaaagcttcggtcttgaaaaccgataggcgtgtaaaagcgtttgggggttcgagtccctcctcctcggttcaaataagtcttatggaggtttgtggaatgaatgttgaaagtcgaaatagcgagaaagcatggaaccgtgccattgtgaaagctgagcaggaagctgctaagaagaagatggagcgccttgctaaaatgcgtgccaaaagtaaacgtaaataattccataaagtaggtaagatggatttcttatctgctattacataagggaagtccccgactgcaaaggagagctagctactcaccaaagcctcgcccgacatccctaaccagtcagttagcatagtttaggttaatgcacaacagtcttcctatagcgcttgtcggaggctgattgggaaagtggttcgaatcctctactggcgccttacatacttcccgaaaagcacttcggacagcgtctggaagtgtacctaggagggttggtaaagggaacgctcaataatcctttactgtaaagcttatttccgaagcgtgctaaacgtcttggagcggagctacatgtgattcataggaggtcagtagcagtcctcagctaaaactagctacactcgtgatggaaggcgaggtaagcgccttggccaaaacattacccatggtggagtaatccacttaggagagcgtcgtacgacaaggtgtccagccacctaaactaagggttgagcattaatgaacgctgttaaccaaggcctgtagggaggtcactaacagcgcattagccaagaagtccagagtagctccctagtgaagtcttctgaagctggagttggctaccagcggccacgctcagggagcatcttagagaagcggttcgattccgctccgtggcattggctgtttatcagctcattctaaaaacctctttcataaagaatcacctcctttcgattagagcagcttaacggctgttcttttttttgttaaaaagtccttgacaaaactttcaatacgtggtatgattaatccatcaaatagatagaggagagatttttatgaaagacacagtaacgatttctaaaagtgagtatgaaagacttttgaaggcagaagcattcctagaagctttagaagaagctggagtagataattgggaaggctatgctatggcatttttttgaggaggaggatttataatggttgaaaagtttgtagcaatccgtagcaatgccacagagaagattatgtatgatactgaggattggttttttctggagaagcaattcagaatcgttgcattgtaaaagtattgagtacattgacatgttccagtgtggcgaggaaggttactataaagtagtgtttaaaattaatgaatacacttacgaagagcatttaccagatagcgcttatacagcaatcactctgattaataaggaggaagaataaatgaacttaggacaactactagacacagtggaatatggtacaagagttaggttagtatattataaatcaacttacaatagtgatgagtatattacaacattcgtaatgtcagacacacttgagtatacaaaagcatatgaattagtagaaccacacattgaaaaaagaagtaattataatctatgttacagcagatggaaaattatgtgttgaaattttataaggaggaagattagtggaaactatgtacacagttatttataagaatgctgtagaaagcgagccagcacttgaaggaggaagcttcttaacggacgctcctaaaactgatggattaaagcttatgacttttgggacaagggttttttgaggtggagtttattgacaatgcggagaagaaaatctacgcaattagaattagataaggagtggtaaatgtgtggaatcagtggacactttattggacagacagagaaacaggtgaagaaggcaacttcaagattcctagacctaatgcactgtttattggaatgcctatcgacattgacgaataccgatacactgtaacagctgtttcaacccctactaaagaggtttggacagagcgtattcctttcgactttggtactaaaccgccttgggaacacaacaattaacttttaactggaggttttttaaatgcttgacacgatacacttaacaaaagacatacaaatccatatagacattcaggagtacctagagcgcttcgagtggaatcgtgcaaagtggactgaagaccgtctgatagctgcttcaccgtttcgtgacgacaatcatccatcgttctttgtaaactataataacgactgggcaggcacttggggagactctggtacaggcgattcaggtaacttcatacagcttgtagcagagcttcacgaaacagattatgaaacagctttagaaatgcttaaagaggagttttggattaagccttacgaagctcctgcaatatccgttaagctaagtgttaagaaagagaagtcaatctttgatattcctactcacaacacttctaagtaccttttaggtcggggaatatctaaggatacacagaagctttacagaacctctgaggacgagagtaaagtatgccttccgtacattaatggaatgggattagcaacggctttaaaataccgtcgaacggataacaaagacttcttttacgaagcaggtaacaaccacttgaagaatatgttgtttgggtatcatgtgatttacgaaaagcttccaaacacgcttgtaatatgcgaggcggagatagatgccatgacggcttatgagatgggctttgttggaatatctctaggagcagctaacttaattgagcgtcaagtagaccttatcaaaaaagttgacgtaaagaatattattataggcactgacaacgacgaaaagggaaaccttgctgctaaatcaatcgacgatgctttctggaaaacccataagctattccgttacgacatgccttctggatatgatttaaacctgtattggcaagagttccacaaggcacctccactaaagaaaataagtgaacctaagttgcttagaagaaagctttggtatatccagtaataaacattagaaaggggcttgacaaggcctctttttttatgctattttataagagtagtaaggagatgttaaaatgaagttgaagaattataaaaaaaccttggacacaagaagacattgattatttagcatggttctaccagaacccagaagaaggctctattaaaagtgtggcagagttcttgggaaggactcctgaaagcgttaaagccaagtattatgaattacgcaaacaaggcttgttagaatatccgtcaagtattaataagaagtggactgaagaagagcgccaatacgtgttagacaactatgggaaaatttctaataaggaaatggcaaggaagcttggcgtaaaaactagccaactaattcagttgaagtggtaccacacccataaaaaataaaggcaatgaaggccttgacaaatagttacaagtgtgttacaatagtgaggtagaaattttttaggaggattcccaatgagaaaacaaacccttttggaaaagcttaaacaagttacaggaaagacagaaaaagagcttaatccaaccctctcccatatacatatccaattatgtggaggctcaggaacaggcggtaaatttggagctgccaaggttccttacgactattcagacaacttcttattcaactctcctgcgagagatacccagaaggatgtttataaacagttagaagtttatgtagaaagcttcaagagagacttccagaaggatggcaacatcaaccaagatgaacggcctataaaaaaatatctatctatggagtgaaaataaaggtaatggaaaaaacttccacagcggctgctttactgaacgagtatatgttcatgtcttggcaagcttcggtaatccttaaaacaaacatgaaacagcctcctgcgtacttcttagatgtgaatagtttccaaacactttacaacaagtttactagaaacggaatcgcaaaagacattgcggaaaagacttcacgagagtattacgaaatgatggagttagcagaaacagctccgctagtagtatttgacgagattggtaatcggagcgctacagaagctttccgagctgaccttcacgacatcatcaataagcgtatggtcaataagcttccatcaatctttacaagcaaccatccaatcgagtatcttgaacaggtgtttgatgaacgattagccgaccgtgttagagagcgtacgatggtttacaatttcaaaggtgaatcacacagaggactttaggaggaatttgaatggcttcaattacagctgaaatgctattatcaaaagttataaacgaaaatgatgtacaggcgttgaatcgtcacggagttagcgaagacctattccaatctcctattcacaaagacgcttacaacttcattattaaatttagtagagaaaacgaaggtaatgcaccttcttatcaaactcttttacaaaaggttccagaattagattatcaaagttctacagaagagtctttcacaagccttacaaaaagcttgaagaactctcgtttacaagtggatacagcagctttcattaacaaggacttaggagagttctgggaaaactcagttaagagtgacgacccgacggagtttattaaccagactattgcagctttagaacagattaaagcagagcacaacgtaggaggagcttcaggaagacgtttagagaaagcttccgaatggtatcttgaagagttctacaagcgtaaagaaggcctttcagttaagttctgggatagccattttgaaagcttaacagaacttattggtggaggctatcaatcaggtaacgtatacacatggtatggccgctcaggccgtggtaaatccacaatcactttagtggaagctattgaagcagccgtgcaaggtgctaacgttttaatgtgggttcttgaaatgcctaagtacgagtttgcttcacgtgcaatctcctttatctcagctcgtgacgaagttaagaaaagtcgtatcaacggttctgactacttggcaggattcaacattgccaaccttactcaagcaactttcgatacagccgaagaagaacaagactttgtggatttcattaacagcttaaacgacaagttggaaggctctattacaatccgagcagttgatgatgaagactttatgaatcgctcattgaaacagcttgaaagagacattgtagaaaacggtgccgacgtagttgtaatcgaccctttctactacttgcattatgagaagaacacttctaagacagcaggtggagatgcttctcagacatctaaggcattacgccttttagcaggccgtactaaaacagttatccacgctatcacacaagcggaggaagactccaacgaaaaaaggcggagacgagcgtgaactaaacattccaaaacggtctaatgttaaaaagactatgtcactacttgaagatgcagcctatgtattagctttcgatagttgcgatagtcgcttcgctgtagaggttgttaaaggacgctcaggcaacgaaggtaagcaggtagaaggtatcttcttaccagttattggatacgttgaagaaagctctgacgaagctgtcaccgatgtttttgaaggtattgaattttagggaggaatttacatgattatttggtcattatttgatagtggtaatgggtgttattcgcaagtttttagtgaaaaggaaggagtggaaaactatagtataggaatggataaagagaaaggtactagcaagaaccaccttaatttagatttggcagatatgagtggctatttcggtgaatccaatatgattaaaagccttgagaatttacctaagcctgacgttataatagccagtccgccttgtgagtcatggtcggtagctagtgcaatggccggtggtaatgcttgttggaatcatcttaaaggagaccctttcactatacgaacatcaaaagaatacgaaagtgttcaattcaatcatgagaactcgttttataatagaatgaacggagaacttacggtatttaatcttattaaaattattaaacatttccaacctaaaatttatataatcgagaatcctgcttttggaaagatatgggaatacattgataaggtattaggtttttgagctggagtatgagaatttaacgtattataacaactacggatttgaaataaagaagcctactaaatttaaatcaaatattaatttaaacctaaaatcagaaaatgttaaagctggcactgaatttagaaaagcctctaggataggtggctcttataatgtacgctctaatatacctttaaccttgattgatgaaatatataaacgaattgaggaggaactgtaaatgagcttttatctatcgcaaatgaacaatcttaaagaaaagattcgttatgagaagacttctgttaagcttatccgagaaagcattgagcggattggaaagcctacaggagaatattctctaggttatactgacgctttgaagatggaattactaattcatcagaagatgttagaggatgctcagaaagaattactcgacttggagaaagagcgcaataaataacaatagtgttcagaagggcttgacaaaagcccttttttgtgttatactaattgggtaggaaggagctaaacaatgacagcaactaaggaactttggaagcctttagtgtttaagggaatccactcagatatttacgaggttagttctgaaggtttagtaaaaaaacaagttgactgataagttattaaagccccaagactctggctatttacatgttagaatccctcttgaaggcaaatattataatgcaagaatccatcgaattgtagcagaaaccttttgcgaaaggcctgctggctgtaatgtggtcaaccatatcaacggcgataagaaggataatcgagcatctaatcttgaatggattacccaaagagataatgttatccactcaataaagttgcgtgaagaggaatctaaacacctctcaatgatagagaaaatggacatgcttctggaaaaactaattccatcacctgaagcaaaatataatttcatggaggaatatgtagaatggctaaagggctaacagcaattaataaagcagcaggaaagactctggtagatactatcgcagaggactttaaacgacaattaaataagtggggagaaacaggctatacatacgatagcgaagtccaccaccagcttatgagagactatcttaaaatagttgaccgaaatcctttcgaggactttccagaaaacgttccagtattccgttcaagtggaactggtaaatgtttaagagagcagactctattcgctattgataagattgagggaagcgatagaaaagaccctcctaaaatgcaggctcatcaaagccgttgggtacagattggtacaaaggtcggtgacatgattcaggagcaagtcttgatgatggagaagaactaccgacgctttactggggaggattgccacttccgttttgaacgtactgaagaaggcttccctcactttgaggagttctcaactacctttaaaaagtataaatcaggtcgtatggagttcatcacaggaggctctatggacggtattatgatttggactgacccaagcagtggagaagagtttcgagtaggccttgaggttaagtctaagcaaactactccagcagctactagtgcattctctatgagacaacctaactcaaaacacgtttggcaagttaagaactacgccatgttaaaagacttagacctgtatttaattgtgtatgtaaactgcgctcacaagtcttgggaaatggctgaagaagactatgcgaagaatccagacttacaagtattcggtgtaaatattaccgaacaagataagaaagacgttcgcaaccgtttcttcacagcgattgaacatgctcatgcaggaacgcttcctccattagagcttagcggatttactttcagcgactataaatacgccttggcaaacagccttacttataaggaattggaagagcttgagaagaaagccgtatctaagtttgaccagaaggctttagaagaaatcaagaagattagaggagatgttaagtaatgaacgaaagcatttatgaaggcattccagaagacatcttacaagagaagttctatggagtgtttattaaattccgttgtgataatcgcactaagcctctggcaatgcacattagtgaactttctaaggaaatgttagacgcgacttatttacaacgtgaagcaggcgaatctaatatcattctaaaagacgttaacacaggtcttgaaatggcttttgacttaactgatattgtagtttactccactaaagagattgctttaggtgatacagaagcatattatagtttcgctgaacatatggctgatatgatgttaggagatgattaaaatacgctttattagttttgacgtaagcagcgtttcgacaggcgttgcagtaattgacagagagccttctggataccttaccttagtccatacagacatcattagcacgaatcctaaacacaacgtaggacgtcgcttaaaaaactttgcagaagctgttcaaatccttcttgaaacgttccgcccagactatgttgttaaggagcagacaatcgctaggatggccactcaacacatcttactgaagtttgctggagtgcttgagatgatagcctctaacgaaggattcccaaagatttacgaatactctcctacgactgtcaagaaggttgtgggaggccatggaagagctacgaaagaagcagtccttatgggtactacagaatacattaattggaacgagccaattgaccttgtaattgacgacattagcgacgctgtagcaatctgtctaactcacattggaaaagagtttgtattggttccactaggggaagttgagaaagctaaagaagaagctatgattgtagaggcggaggcttctaaatatcttgaggaggctaccgaatgaaacagcagttgagaattgccataacaggaacttctaggagtgggaaggatacctttgctcaagctatccagaaaaagttagttgaaatgggctttgcagaagctatgccgatagcctttgcagaccctttgaaacagctgtataaaagatacttcttctatatggaggacaaagagaagccaagagacgcttatgttaccattggaaatgctatgagagaggttaacgaaaacgtttggattaataaccttttaatacaggctgccaaagactgggacgaaggcttctcaacactagttacggacgttcgtttcgagaacgaggccaaaacacttataaacgattatggatttatcttggttaaggtggatgccgaccctcttattagattagtccgtgctgaagctttaggtgaaacacttgatttaaacaataagggagacattgaggtaggaatgattgagcctcacttgaccttcataaacaatggggagagcgacttaatgcaaatggacaaatatgctgaaataattattaatatggctcaggaggttgctaatggctaatctattaatctctgagaaatcatactatgaaaagttagtagaagcggaaacagcaaatgagttccgtatggttttaataagattgattaatagagttgttatgaaagttaaagtaccacttgaggttagagagctttttttgtgaagaggttttagagatgtattacgaacgctttggcgacgtagcattgccagatagcctagcaaacatcctctcaacatattatatgcaagacgatactagaggcgatttggaaggcactaacaagttcgctcgctgttctaaaatggagtatagctttgcttctgataaaaaggagaagcgaatccgtactgaggacttatataaagaatctccaatcaacttagaagtgttggaaggaaatggttattcacgaaataatattgcctcatcattggatatggagcgagcagctcttagaactgacttattaaaggctatggcaaaagcagatttaactgagatggagaagaaagtccttgagctaaatcttatctacgattacactatgcgtgagattgaagtgcttccagaaatgccttcaagaagcaccttgagtagacaccttacctccgctcgcaaaaaagattatgcaacaaatttaaaatactttcaaaaaggggcttgacgaagcctcttttttgtgctatattatattcatagacaaagacaactaataaaactacttggaggaatatataaatgcctagaacaaataataaaatcagccgtaagaaagcgttagaagtgtatttagaagggagtaatccattagcggctatctcagagctaattgaagagcatacttggacagttggtttcgatatggagtcagcaaccttttataaagagcgtacaagcaatccatacgacacctgcaagaatcctcggtgcaagctttgtaaacagattagagaacacgctgaacgaatccctgcttactctttaggcaagactttagctaagcctttcgaggaactttctttagggcactttggtaagctagctgcgaatgatgtagcgaaatcagatatgccgaagcttctgaaagtttctatgaaagatattaataatcatattgaaatgcttgttgaaaaaaattggattagacaattccatcaaccttctaaaagactacgagttatcagaacaagttatccaacagcttttagggattggtgtttatgatatgcgacaatttaagaaacgtatgtacgaaggcaagaagcaacgtattgccgaagctaagaaaggtgagtgggcttaatgaagcaatatataaagataggagcagccattttgattttgcttattggagtagctgtgtggttaattgagtttatactgccatttgttttactaaaatgggcattgtagaaagggagggattttagtatgggacttttagaaagaatcacatacagcttatttatagctttggtagtagttttagcagtaggagcattttttgtaggtgtttattggctagccgtttggactagtggattaggaggccttggaaccttcgttgcagtaggtattgtaatgttcgtttttacagctttagcggtgtttcttggatttgattaaggaggaattttaaatgaaattgaaagacttattagaggtagtagacccaatgcaggacatctctttggagattgctgaattaacggctccagaaggtatttatgctaaggatattcaaaagcttcgtccgatggctgtggaaatggaagttgtggacgtccatactgcttggtatagtggtgaagacagcatcgaaacaactttaggagtcgttgtaacagggggggtaaaagtaatgcgtaaactatttgaagagaactttacaattgacgaaatgtcagagatgtggtatggctgggataatgaaggccttttatacggctgggaaaatggagaagctggagaagtttataatatacttgaggaaaatggttataacatggactccattaaaattatgtatggggcattcgtaacacttggtgaattggtaggtgcaatttaggtatgcttattagagtaaacgaagctgagggaaacacttcctttatcgaatatattgagctttcacagtcctatggaggaaagattaacatagagcttttttgtagaggatgttgaggaagacaatgcctttccagcaagtgaattttacatggatgatgaaactgtagacaagcttatccaagcattgcagagctttaagaaaggggaaaactaaatgtctttaggaatgtttgacaaagagcttttagcagctctagcagctttacgatgggttgtagaagaccctgaaataaaagagcgccatgatgaaattttaaacacagcgtacatggaaaacgcctatgagaaaggcgactcattccctgatgaaaagtttgtggaatgggatttcattaacgccttaacaacatttgaaatagaggcggctgcacgaggccttattactgatgatgaagcctacgatgaagaagacgatatggactgggcaagcgacacctattcatgtggctgttgcacatgctgtggatgcacctgtgactactatatgtgggaagatgatggaagctttgacgaagacgatttggaggactaattgatggctaattattacgtgttaaaaagacttgacgacggttcaggtaaactccatcaagtcaagtgttacaaaagcttagacaaagctattaaatacgctaaagaaatgagcacctttaaaaagacttaccaagtagctgggcaattcgatatgaacaggcttgctaacactggtaggctaatttagaaagttgtacgagaggccttgacaaaggtctctttttgtgttatagtaaatccataggaaatatttaggaggaagattatatgaagatttcagtagacttacctaacgaagataaagcaaaggcggctattaaaaaaagttaaatgcaataagcctttattaacaatggaagaagcttgggcaaaaaatcttctcaatgaagaactctgctaaggataaggagcgccttaaattagttaaggaataccttgaagaaggtaaggtaagccgtgaggaagacaaattaaacaagaacttctcaaaggccgaggctctacgtatctaccaaaaggttcaagaaatggaacgagaagctaagtttgacgaaatccgtaagaaagagtggaagaaattccctatcataaacaatattgtagagcttgctagttggattgacaacgctcttgaatgtgataatgaatacttggcgatggactttgaaacggtcggtgacaatggtggaacagacatgtatcgtgaagagatctcaggattctctttaacataccgttataaaggtgaaatcatcaatggttacgtgcctatgcgacaccgtgaagaagatggttctccaagccatttgaatatcgctaacgtgaagtgggctgaagaaggaattaagagagtctttgagtcagataaggcaacagtatggcataatgcaaccttcgatatggggcttgctaaagcttctttaggaatcgctcctagaactcctgtccacgataccttaatcttaatgcaccttcttgatgaagacctaccaagctaccagttgaaagttttagcaacacgcttcttgaatattccatcagatacctttgaggaaatgtttggaaagaatgctaagtttgctgatattgccgttgaaattgctcgttggtatgcaggcaaggatacctatgttggattcctcctgtttgaatggcagttgaatatccttaataagccttcatttgctaagattaaaaaggtttatgaacggattgagcggccttgcattatggccacttttgaaatggaatcagaaggctttcacattaatatggaagaggttgaggtacagcgtaaggaaagcgaggcagagttagaagagatttctgcacgccttcaagcacgctttggagatgttaacttcagctctccatcacagcttttaaaattgctttacgtagacaatgattggagtaagtatgttacgcctgaccacaaatccattctaagaggccatgtgggctataatgaacatggaataagcaataacaaattgtttgcattaatgcctaacggaagtgttatcctagaccctgttgtgaacgctgaaggaaaagttgttcctaagaatgaccgaaacaagttacaagccaatgctaaggctatgaaaaaagattgccaaagctgttgacgaggttcaggacatccttgactacaaggatttaacaaagcatttgacagctttcgtaaacaagattgacaccttcattgcgcctgatggaaagcttcacggacagtttaaccagttcggtactgttacaggtcgtttcagtgcttctaatccaaacttacaacaacagcctaagaaagctcgtaagatgtttgaggctccagagggctcattaatccttggtgctgacttctcccaacaggagccacgtttattagctcattcaagtggatgtcaagaacttattaacatctataatgaaggtcgtgacttgtattctgaaatggcttcagcaatctttaataagcctatcgaagagtgtttagacggctccatttaccgtaagaataccaagatgattgtccttgctatcatgtatggaatgggagcttacagccttgccgacatccttcgtatcgacgctcaggaagctcagaaaatgattgacgacttcttcgttgtatatcctgaagtagaagcttggattgaaggaaataagaaaacagttgttaagcaacgctatgttgaaacgctattcggaatgcgtcgtagattcaagcatgaaaacttcgacatccttaaaaaagaattggaactccttagatgaaaatgacaagaaactccgctcagcagcttcaagagctttacgacaagctaccaatgctttaatccaaggcggtgcagcctctcaaactaaactcgtaatgaacgctgccagaatccgtttaaaagagttgtcagaggcacgtggagagcctaactcatttggattccttgcccaagtgcatgacgagctgttatttaaagtaccagaaaacgttacacaacaagaggtagacgctatcgaagacgttatgattaacactgtgaaactagtagttccgagtaagactgatattgagattggtaagaactggggtaaaatgactgctagaaaagattggtttaaataaactttggaaaaggggttgacaaacctctttttctatgctattataaatccataaagaagagggaggaatcttttatgaatagtttatatgaacaatttaaagagggtactttaaaggaaggacaacggttttctgttacaggaacaattgtattgattgatgcagaagaccctgcactacctttaaaagtagacattgatggagaaggtattaaatggcttaaagaaggagctattaagtatatggaaccagctgccgagaagctgtatgaagtaagtatcggaggccgcctactgagctattacggaagcgattatgaagaagggaaatggacatgcttttttgtggagaagtagagaagaacctaaagacatttttgttcaagcgtttcctatgagcttcttagaaaaacatttcccagaggttgttgaaattgctaaagaatccaataaagaagagggaggaaatgccttatgaaaagatttgcgattattactagaattgaggaatgcacgcctgatgaagacctcttagaattagggaaggcttacgagattgtcaatgaacttgtcggaggggctcacgtatatgttgacgaaaggcataagcgttactttgtagacagccatcaatacgtagaagtagctgaaggaatctttgaactaactttaggaatgcttttaagcaagcttgacgaagatattaacacaaaccttgaaattagttttgaaggtagggctaccaaaattgtttcggaaaactattacaaagacgaactaaaggattattttgacagagaggtaaaatggtattctccagacactgtggtagatggattaagtattcttttggaagggggagtttagcaatggaaattaaagttgagcagcctaaagaaatccttttagaagttggttggagatacacttctgactggattgttaattctaccacagtttcagtggaagataatgtatatgcctatgagaacgcctgttacaaagtccttgaagagctttgtgaatccatcgatgctaagtatattgacatctgctttgtaagggaggccaccgaaaatgcctaagaaatactatctaaaagctatttcaatgtatatactatatgctttcatagcagccgttattatcggtggaacattcctgttagtaggagctttcgtatgggtaggtaaatacgtttacggaagatttggggacactgttggaacaattcttttcctctccacagctggactgatagctttatgtacagccctttactatgaagctagaaaagagttccgaaaagacgctttgagagtccgtatacaagaccctgaagacggcatcaatacgcagagccataaaattgtttatatgcttccagaagacgttatccgacaagcctcgacaattgttggaattattccaaaagacatacaacatatcgagtccgaagagcttcggaaaaaaggttctccatgccatcatgaagtattcaccagtggagtatggatttacgcttatcacagagtatgacccagaccgtaattttatgcttcgtgaaatatgggatttaaactacactttcaagactagaggaaagcttatggaaaagcttatagaccgtggagtaggacttgatggagaatttttgaagtatcttgttgactaattaattaaagtgtgttatagtagttttgtagaagacattaaggaggagattttaaatgaattacgaagagtttaagaaagagattgaaagcattgactatctaagtgtagagaacagatatgatagagtgcttgtgtattcttcattaggcgattatccacttgtagcagtatctattttagagacaggttttgtggactataattggagaggccatgttagggcgcgtgacattcctgttttaacagaagcagtagaaaagtttgctgaaactccttatgaggagcgttttccaaaaaaactactacctacttattggagaaaactatgttagtggaattactttcacatacccatggttatcagctgactgtgagcctgaagaacctatcgaagtaactttcaatgaagcttttccacacttgtttaccaacaggaataaagaacaagcttctaaaatgcttgatgctgcaaaaattaaacatacttgggaggtagtttaaatgaaatacactaagaaagaccttaaagaaggcatgaaattgcgtgttattgacggagctggctttgattttttgggaagaaggctcagtacacgaagtaattaaacgcaatggaacacttattattgatgacgacgatactcttggaagaggaattagaaacagtgatgacatcttaagttatctaaatttggaatatcctgtaaaaaatggaagtagtggaggaaggcatcatgaaaagcactggggaacgcataactagagataatattaaagaaggcatgaaagtagtgtgtgttaaaagcatttatgagtcacagggatactttactgttggaaaagagtatgaagttgtaatgggtaactgtggctacttaggtattaaggataatggccgtgatggatttatctgggattgtgcaatctttaatgaagacaagtttgtcttcgagattttggaagagccttcagaaaaaagcttctttaaaagctttagaaagtaaaattagagagcttaacaatcatcagcaagagcttttccaaaagcgtgacagaatcaataagcaagctatccaactaggaagcaaagcacgccgtttagaagaggctaaagcactaatcgagaaatacatttaggaggcagtcttatgaaagatttttctagtagtcgttatgattggcaataagatgcttaactttgctacttctacagaagccatgacaatggagtttgtggaaagccttaaaaaaagagctttcagaacagcttagcgaagacttaacacctgctgatattacagttttaaatatcattccaatggataagaaacaaagtagccttattacaggcatttaggaggagtttacacatgttaacgacagattttattaaggcggtagaaaagattgggctagaggttgataatagctactcttcagtgctttatgtagaaagtcacgatggcgttgttgtaagtattaacaaaggctgttctgaaacttttacatggtgtaatggaacagacattcatgtaggaagccttttagagcttatcccccttgtggaagagtacgccaacacgcctatcggagagcgtgagaaaaaggtttccgagaagcctttagagtcctacccaattgaagagttgggagaggctatttctaaaatcctattaaacaagcataacccaaacgctcaagtagttatctcacaggagcgaatccatttctatgagcccaagtggagtacaccttcagaatgggcgcttgaaaacttataataaactttcaaaaaggggcttgacaaggcctctttttcatgctatagtaagactatagaaaagacttaggaggacattatggaagacttatttaaatttgcgtgtacgcttgtgttaatgactgttctaatctctgggtatgtggctattcaattagttattatagcagtagcaggaacctttttaccgacatgggcgtttgtaattgttttaggatggcttgtatacactaattacagagtattgttgaaaggtggggaatactagtgaacacggtttaccaagacactcaagacatttatttgaaagctttttggatttgcattgatagagctagaaatagagcaggcgtaacatggacttaccttcagggcggcgatacgcctagagcaattaatgggacagctaatccatctatcaaaaaagactttgcagcttatggacaagcttgacttagatattgtagactttcaattggacgttgcagaaacttacgaaagacttttagaaggaggactttattaatgaatattttaaatggttcagaaatgtctcggttaatttacatggtggagtgtcagttagctgatgtaaaatgtaacttggcgttttatcagcaggattccataagtggtagcccaggaattatcgaatcccttacagaagatttaacagagcttactagaattaaagctcgtttagaagtaatgttagagcaatttgagaaacttgtttaggaggatatttaaatggatttaacagcagaagaattaacatttttagcttgccttgttgaaaacaataatgaagaagtgcaggattcaataaacatttacaaatcctttgataaagacgctgcagccaaggttcttgaaaagcagttgttagaaagtattagactggctagtaggcttcgggaagagtctaaaaaaagtatgcttatcggagggctttccatatgctgattaaaaaggaaaagaaagcctacctattcaccatttatggattgcattcctacccctctgtgataggtgttgactcttattcagattcagtagctatggaacgcttttataagatttggcggaaacactatccaaagcattacaaaacgcataaagaatttactgttaaaaagtttgatatttagtattgacaaatccaccaaggggtgttaagatagatttatcaaatgttagggagggctttaaaatgattccagaaggcacctatttaaaagattcgtcaggcctcaaccattactttatcgaaggccacatcgtaggcgttaggacaggagtaagaggctatcagacagttgtttgggataaggaattggacaaaaatgtatgaacaaaaactttcacgaacagtctctcatgaacgatgttaaaatgtctaagaaagaaattgaagagtttaacaaaaagtattatgaatggagttggtcacaagatgtctaaacatttctatgcaaacactagcccagacatggctgtaaactatccaaaagga

SEQ ID NO: 2 - DNA, 139885 bp, Bacteriophage F170/08
tttgcatattgctgtaattcatctggtgttagctcttctagtctttttttcatttgttttctccttctaatgtaattttctctacgtcatcaacactaccaaaagatgggggttgtgtcaagttcttatttaaccagttagcgataatgtcatgtaactcgtctatagcctcatcgcttacttcatccgttgggtagtagtcctccgctacttctccatattcactgtatagctgttcccctacagattctaacatacctactacatctacactaataactgctttattgaactgccctactgcaaagcttgttgcccccttttcaggtaatgccccaaatatatcctctacgtgcatccctaagctatctacatatgtttttccttcattaatggacaataatgcaagttttcctgcagacactgcctcttctctcgtagggaacgtctcacacgctttccatacacctgtgtcttcctctagtgctaatgcatagtctttatcttccattgtcttgccctccctatccttttagtataatcatatttgtgttactgtctaagtgccatccatcaaattctaaatagtggtcataggggttaattggttcacctacaactatatagtcctctagtgcgtgaccttggtcttttagctctagtaattcgtctagtaaatcttgtgctgtcaaattattcatgccatgtagtatcctttctttttagcttcttcccactcatctacataaaacaaatgctctctccgagacagagagccataacagtttactgttaagtctaccatcaaaaagcccttatcatgttttgtccaatcctccgtatagggtgtcactgagtgtacttctttaatatactgttttaacacattcattttacatgcccctttcttggtttgaattttcgtgtttgtgttcggttgtttctactcacttctttgtatctacggattcctaatgccttagattctggacgagaacgacctatctgtcttacatataagtctagcgcttctcttactttatcatcatacatcttccctaattctcggaaatactcaaactcacctaaatccacataaggcatacgccagtcatctagggtagcctttactattgttcgtttgtttaaatcataattatagatatatagaaacactatataagcacctgtcatcacagaatagcttgttctaatttcacgtagagttacgctgtctcttaatgatgttaaataaccattccacttttttttacgttcttctgctaaagtttctatgaagtagtttacctctttttcgtccctcactacttgctacctccttgttgtttatgtctatatattatcatctactttgttatatgtcaacacctttgtaataaaaaaagaacctagtaatttacttacttaggctctcttgtttatatgtgtttagcaagctacctttactatcgacaacaacagcattaagctgaccaccatatgcacaggcaccatcaatgaaaatacttctatcacctaagaagacatcgtaactgttctcttttctcagattaattgtgggtgtgtgacccattacaattgtcttatctgttttattcttctgtaacgctagcggtctcgtccaaatcatttcatctttagtagctgttttccaatcaggctgacgataaacaggtatccctgcgtgtacacataaggtgtctccatgctcatagtatggttctaataaactaattacttcaactacatttgttttttctaataacatctttctagtggtaaacgcatcctgtaggtgttcatctaaatccaatagactacttattgttttatcaccgccattgtacatccacattgcgtacatctcacttaggtcttcgtagtctgcttctcttatcaatggaaatgttaaaaaatctaataacatttggtcatgatttcctaacaaagcagttcctccattaagtatatgcttataaacgaaacccagtacttctgcggatttgctacctctatctacgtagtcacctaaaagtattaagtcctcttcatcactattccaatgtttattaagaagcattattagctcatcataacaaccatgtacatctgatacaataaacactttatctttcaatgaataatagcccccttaactacttctgctagccagtaagtagccagtactagtacagtattgacaataaatgttattactataaccagtgctaacttataatttttactcctagcattatagtttatataattttttatgttaactctaatatttttaaacaaagtgctcccatatacgttcagtgctatatatagtaaaagcaatacgataaagtagccttgagctagaaacacgtcagactccctgaacgagttattaaaccatatgctgaatatcgcaatcacttggtgaattataagcattgcgccattaccaaaaaggagtatactaaacgctataccgactacgtctctgtactctgaaagtagtctatcatatactattatccctttagtaaaaataaaagcaacaactgccatctgtataagtaaaaatattgttacggctaataagttttctgtatgcatagtcataatttagccactcctttcaaaatgggtaaagaaagaataataggtatatcgttctttttctaccctaccctcatgtataaaggtgaactcaacaaatttaactcttaacggtatatctggtgctttctcccaaggaagtactcttgggaaatcatagaatactcttgtgggataaacttctttcataagtatcctagggtatcttttctttggtataaatcttttacctattatacttgagtagtcaggtttcattgtaagtcaccatgaatagagtatgctctacttgctttgttaaagtttacttgttttttgtttactaatcttattgcatcttctaataaaagaggttttcctaatttatggttatctaattctggtgagtctacccctacattcagtaagtttggttcgggtctggctaactcatgaatgtgtccatgtagattaattaggttacctctatctcctaaaattagtgggtaatgtgtcatatgcacaaccttatgcattcgttttaaaataataccaacgtcttcccaatgaaccctatcattcagggaagtattgcgtttaatctcttttcgtagaggactattatcgtggttaccctttattagccatatagtgccatttaagcgctctaagacgttagctatactatttaccttggcacccattgcgaagtcccctaggtggtatacaacgtcttctggacgtactgtagtgttccactcattgattagatactcgttcatctcttccacatctttaaattgtttccgtgtgtccataaaagaggcttccccacaaatgtttctatggaagaagtgcatatcagatattacatattctctccccatacttgctcctccttagtgtgttgcaaaccatacgaatacagctagttgtagatagtgtactgtttggtcgataattagttgtgtctttttattaggtactgtttttaagaaccatgcactttgtgcttttaaatagtccatgataaaatgtggaacccataagcatactacaattagcccaagttttactggtgttcctaagaacaatgtagttgcgacaataatatacgtccagatgtttacatggatgattagtagatataaatcagtctgctttccttttgcgatatagtcactttgtaaggcatagtcccctactgcatgagccattgtaaggataattacatagtataagtaattcaaattaagtcctcctctttgtatgggtaaggacaagtgtcacattcaaatccatattcgttaggtgctccctctaaaatatttccgccacattctgggcaagttactagtttcattgttctgcctcctttacatgatttcaagatatagccctgcacttgatgttgtagaaatcagcataacttctaagtctaagtgttctccgataccttcgtattgttcaataagtggttttgtttctgataaagtgaatgttacaatttcttaatccgtcatgtgctctactaatgtgactgtgcgaccaaattcaatatgttgtaataaatgtcctagtttaaccattataacttccctccatcaattaataatagtaagataccgcctatcacaagtaaccagaatactgctaagattagtaccatttagctatcctccttgaacagctcatcgtataattcttgaactgcttcacgctttacttttaacattgcaatctgtgttgatatgatattacttggttttcccaccaaacgcccctctaagtgtccaatatccatattatattgaataagggtttgttgaaatttttttctaatctcggtgcattcattaattggctgcttcggttcaatctcaatcagttcaaactgagaataccagtattcatttaatttattcagtagctcaccacgtgtttttccagattctgcagttgtcccatcatcatctttaataaagtaccctatagtattgttgtgagcaatcctatactctttgccttctgtgaaaaagggttcttgtgggtttgtaattacacatttcattctgtatgtcattttagtaggtctcccattcctcaatgatgtattggcttttatagtttgcatagaaatctgagtcacttgagaagtatatatctagttcttttactttttctagtactccttgaagggatgtaccaactgccatgttagtacctgtccccttatcaattccgagatagagtgtaagtttctttggttctgcaccgagcaattcaaacttagaatgccaatagttatttaattcagctaatagtagctcaggagtggctcctgattctataatgtctccctcatcatctctaaggaagtaacctctagcatcatcatagaatacatcgtactctttaccttctgtgaatatatgctctgttttaagtgtacatctaatttttactgtcattctaattttcctccaattcaatttcttttattgatacaaagccaagtatattgcggaaagtacggtcttcattccagtatataaattgtgttagaagtggtttgtggtcatctgtgtatgttgtttttgtctcgtagtagctttcttcaatttgttcatcaatattctgtaccatttcattataatatgtgactgctttatcatatgaggtgaaagccctcatttttaccgctctatactcaaatttcactaaccatgctgagcttaatttcgtcatttatttcttcctccacttctttgattgacttgattatatatctgtgattctctctaaatgcgtggtaagcatcatcaagtgaatatgcgtataaccttgttgtttgcattacagttctatatccgttacgtccaaccattggttcgtcaacttctacttctaactcaaataatagttgttttctaatcattgtttttcctccccttttctatgatataatattaccctactattatgattctgtcaacaggcaaaaaaaagaagtagaaaaatctactcctattcatcgtttgacaacttttccataccatatagtaactgtagtagtacatatagtacaatatcaaatccgtcaagtggctttccaagtactataactttaacaattgtcaataccgctaaaaaaataaatagccacccgattattttatttgcatgttttctaattctcataactttctagtacctcttcaatattctttctggtttcgttagctaacttaccagtccgttcaagccaacctttaaccatttctttttctactttgctatgtttattcgcatcctccttgatgccttctacattttccatcaaattatctaagtcctccataacatctaataaagtgtttcttagttttaacacatcgatagacaactcatagttccgtttagacaatttttcgttacggataaagttcttttttagttcttgttgtgtttctagtagctgagtagttttaataatatcagcttctaatttactaattccgtctagttcattcatcacatgtcctcctcatattctactacttcctcaataagtttcagtacttcttctgctgtgcccactgtgctatagtccgcaaagttttctgcaggtttcataatagccactgaatagggtttgttctctacataaatatgcccgaatccttttaaagaatgaattacctctactgcccatccattagcgtactcttctcggtatactacttgctcactggttgctcttactggtttattcattgttaaaaccatagaagtttcttacaatgttttctacacgttccatgccctctaagtagctacgtttctcaggggagatatagttcttgtaatgagggacttccttctcttcctctacctcttttgtagtacgttcaatcagtttaataagttttacttcgttctctagttgagactggataatgtctaacagttcatttttcgagcagttgtttagtggtttacttccatagtcaataattgtcatagtagtcctcctattttaatgtgtactctttatagcctttatgtgtatcgtgcccacactttgtacaaaagcctgcttgttcaatatctattgaagagtaacctgtttgtactgcatatgtctcataagtatggtcacacgtatcttcttctgattcgtctattttctctaaacgaatagcctctccttctgccacttcgtggttaaagagcaatactgcagttttaataggttcatatatatctgggtggatggcttcattcatcttaaagctatttccgctaaattcattgaaagcgtctagccattcctgactgttctcatatgatacaattctgtaattcatacgaaagctcctctcgtgttttcttaaataaccaataccgttcatcaatttcttttatctctgcctctgttaaatagtagtcttttaatttagatagggtatcttgactcaatggctcgtttctaggcagtatacttactgctaacttcccgtccttgcgtaatagtaacccgtagtctctcttctgtttctcaggcattactacatagtacttaggtaaactagcagtgtttgccactgcttgaataaaagtatctgtatttgcgaaaaaccatttactaaactctgacttagggtactcacatgagtatctctgtccctccaagataatttgtaacttatccataagctgttctcgttgtttatcaataaactcttttacctgttttggcacttctacctcgttattcataacctacctcctttgttatactttgtcaatagtgatataaacatatttaccttctaactgcctaacaatgtttagtatgtcatgaccgcctagcttaaatgtgtttgtctcaaacccttcgatagtaaaggaagaccaaccgtaccaaccttcttcaaagtccaagacccccatagatttaagtactatatttttagtgatgtcttctaatgaagtacgttctacagcagagaaaatctgaatctctgcgttatcaagatgatacttagaagaaatgcctccatcgtactcctcttctgttgtagtgtcctcagcccctaacgcatgtagtgcattacaaataagcatgtttaaggctctgtgctcatggtgatactcaatttcttttactttttcttttattaagtaaggttcgtttgtttctgcaccggggctgttatcaatagttacccaaccttttaatatctgtttacccatgattgctcatcctttctttagtatagcctatcgctgtcaccagtaaatctaaattttcctttgtcagagttactgtttgctcatgtacacagtccggtctaaatacctctactgtacgatttattacagcaatatctacagtagcttccgttgtctggcttaccttgataaactgtttggaaaactccccacggctaacaccttctatcataagctccatttgtttatagcctcctctcgggaaagtccatgaaagttgtggaaagtacgctcttgtagttcatctaccgtatctggtagtgtacgaaattcgtctacccctagtgaaatacttgaagctacctcttcataataacatttaacgtctactcccatttcaccataaggtaacaccattacttctatatgaaactcatatggagtattctgtgttaatggttcatctaataaccatgtctcatggtagtttactggaatatctaatagtaaactgtttaaatcatctagctgttcagataagtatgcaattcttgtcactttacggtcttctgctataggcattgaacaacctaacgtgtcttttatttctttaatttctttggtaagctcagccattaattcaattattttataaaacatctctattcctcctcttctatatattccccttcttctaagaaaaagcaagcaggttctccctctccattttcagtgtcacctaggtactcatcatctaagaatgcacagtatccagttgagtagagggttacacagtccttatgatacatcgaatcgtccgttaaccgcacaacctcgtccatctcactgaacacttcattacacgccccgcatgatattaactccttactcataggctacctcctttatctattacgtagtctaccagttctctaataacctctgcctcctctacactagagaggtctgcccaaacttgaagtgtcgcatcgttagccttaccagatattaaattgtgtaagctatctgcaatagttagctttgtacgttcaagatagtggattagccagactaatacaattagctgtttctcagttagctcagtagtagtctctgtataaacctcatagttatctaagattaatgggagggtgtcttcattattaattacttgaaacccattatttggttctcgttcatactctccataggtcagtctcttacctatttttagttttacatagatgtctctaccttctttgtgtagtttgtctaggtcactattgtaccactctcttgtttcaattttagtaagtcccatagactagccctccttgcttagctccttaattcgtttcttgatatttgcttctgtcttctcaagttgtctcattttgttagcatgacgagacatctcatgctcttttgcagtcactgccatcgctaataggttctctaaacttactttatttgccattaaattgccacctcatagttaaattttccattgtgtttataatttactacagaaatatctgataatggggaatcaaagaagttcgtccccttcttccatggtaggacaagctttggaacctcttctggaattggtgcgtttacctgtttctctactagctctaaatgtcgttcgtaaatgtgtgcgttatcactcgtccaatataagttacctaactctaaccctacagtatttgccataaccaattgtaatgcatgatactgaataatattaaatggaagtcctaagcaaacatccgaagaccgagccttcacatgtaagtttaatttaccctctacaactgtccagtgggttgtccatacacatggttctaatgacatatcgtataaatcttccacgttccataaagtagtcataattctacgagagtttggtgtgctcttaagttgttcaataactgcctctacctgatttagctttaggtatggttgatgtgttcctgctatccaaccaccttttttaggtacgacttttggaataagtgaacctgctttgcgatttttagctaactcaacatctccactataaacaggaataaaacgttctttgttaaataatgcgtaaccatacgcttttccaatagtgccatcttcttgctcccattcgtcccaaatagttacacctcgttcttttaaccacgaaacctcattagacatttcttgccaaatccactgcaattccgttagcgcccatttaatacctacatgcttactacgtaataaaggagcccccatatctggtgtgattgtaaagtttacaccttcaataaacttagttgttgcaggagtcccatcagcatatactgcacgagtcccttctggtaattctgttactccgttcttaataatatccattactaaatctttataaattttatcaaaatccatgttgtgccctcctacatttcttttccctataatagaaatatatcatatataaatttaaaagtcaacaaaatattataaaaaatatgagacataccagtatgtcccatatctactaaattctatactaaactggctagcttgtctaaagcgttatagtccgcatcggttactggttctactttacctaataagtacccattacctacctgagagaagaagtcatggttactagttgttgtagagataccattcattacaatagggtttacgtctgcacttgttgttgggaataacgggttcatccctaagttagctagagctttatttaaattgtactccaaaaatgtattaacatcttttgtccaaccaatctcactatacagttcagcagtatactgtgtttcgttctcccataatttaaatgctaaatcaattacccattgttccatttctttttgttcagtttctggtaactggttaaaccctaactggtatttatagccgatataggttccatgtacagactcgtcacgaataattaatttaataatttcggctgtattaaccatttttgcctcacctaaatagcgtagtggtgtgtaaaaacctgagtaaaataggaagctctccaacagtacggatgcactctttttctgtagtggtgtaccgtttcgataaatatcgttaataatattagctttatattgtaaacgtttatttgtagctacccattcaaagatattgtcaatctctgtaggtgtattaaatgtgctaaaaattgttgaataacttttagcgtgtactgcttccataaaggctatgttatttaaaacagcttcttcatgttgtgttcttacatcatcaagtagtgagtgtactcccgattctgattgaactgtgtctaataatgttaacccaccaaacactttatttattaaatcttgctccatatcagagagctttgcccaatcattaacatcgttacctacagggacacgtgtgtccaaccaaaattgctcagtaagctttttccatgtggcttggtcaattacatcatcaatcttattccagttaattccttcatacttttcttgcaaattcatgtgttcatctccttaaattgtacaactttcacactctgaaacccctacttcgcttccgtcttcttcggtgaatgttctaacataataaattgtttttataccttttttccatgcataatgtcttaataaagttaagtcccgagtggatgtagcgccaccctccaccttccaaggataaagattttctggtaactctgagcgcataaacaatgttaaactcataccttggtcaatatgtttttgtgccgttgcgtacacgttgattacgtcaatcatacttgtgttgtacgctgacttgtaatatggaattgtcttctcagataaccggggtgcagggtaataagttttacctgttttcccatcttgacgttcttcaatcatagagataattgggtgcaatgaagaagtagtctcattaacataagcaatactaccatttggagccacggctaagcggttttgatggtatagaccaccttcaataatactgtttcttaatgtttcccaatcttttacattaggtagcaccactccatcgaatacttccgccaccttactagagatttcctgatttagtgttggtacatattcatcaaagtaagaaccgtctgcgtatttagagttctcaaagttatagaatgttgtgccacgctctttagtaatcttattacttgccaccaaagtagcatagttaattaattcaaatagggcatccgtcatttcaatagattcaggtgagccgtattctacttggttacttgcgaaccacgcatgtagtcccattgcccctaaaccaattgtatgggctttatcattaccattcttgatagtaggtactgcttttatatttgacacatctgtaatatatgttagagctcttaccatcgtctcaattgatgccactacatcattagatgtttctaacaagttaaggatgttaattgaacctaaattacagctaatgtctgtacctaactcttcgtatacttgttcatcatttagcttagatggtgtctgcacttgaaggatttctgaacatagattgctcataatgattttgccatcaatagggttggctttatttacagtactaacattcataatatatgggtaacctgactcttgttgtaaacggctaatttcttcttccaaatctcgtgcattcattaccttacttctgatatttgggttctgaatcatgttattgtattctgaatcaatgtctacaaatgagaatggtacaccgtattctttagcaacatcatatggagaaaataagtgaattacatccccagactcagctagctcataaaatttatcgggaacaactactcccaaagaaagtgttttgatttgctttgcggattctgcattttcttttctagttgataaaaagtccataatatccgcatggaaaacatttagatagactgcgcctgcaccttgtctttgtcctaactgatttgcgtaccggaaaccatcttctagcattttcataacagggacaaccccgctacctgctccctcaattcccttaatagggtctccaagagctcttaaattacttaggttaataccaactccaccaccaagtttagatagttgaagtgcactgttcaacgttctaccaattgaagacattgaatcttctacttgaattagaaaacagctgacatactcccctcttctaagcctacctgcatttaaaaaagtaggggttgcaggttggtatctacggttaattagctcatctgcaatcttcatagcaagctcttcgtcaccatcacccattgtgagtgcattaaacgctactctatcttcataacgctctaggtatcgttccccatcatctgttttcattgcgtattgtttgtagaaacggtaagcccccataaatgtgtcgaatctgaactttttactatagatgaacttaaataatttttttataaattccattgagtacttgtcagtaatcactgttttatcgatgtacccttctctaataaggtaactaattttctcctctaaagagtagaaaaatactgtgttcttgtttacatgttctaaaaagaatgctctaacagcttctttatctttgtctaactgaatctttccgttattagggatattcaattggttattaagctcaatatatgtgttcatatctacaccccaagttctttttctagttttttaaccaaatcaggtctaacaccattaaatgagaaaccatcatcagcttctacatatggtaatgaagacactcctttttcttttagataagctaaagcttgctcatcatgagagatatttttctcatcaaatgggatattctttccatttaacatattttttaaaaataaacattgaccacacatatcttttgaatatactgttacttttgtcatttactacattctcctaacttttttatcgtatttattaattatacactattttgcattaattgtcaaaaataaagaaccaaaaaaaactagagactacaaaagttaattgtagccccttttaataagttacaccttgtcacctaagaaatcttctgattcctgcgatttattcgtaaccttatcaagtagtaaaacagaatagtttttaccagtttcaacctgcaacctattaaacactttctgatattcttctggtgtgtctgtaacttctaataagtattttgcatttaaaaatgatagtaattcaagtagttctgccttactacctgccatttgaactacaacgttaccttcatcgttcgtgtatgttccaattttatttctagtagccaaacaaatcagtccttcgtaaatttaatgtatttgttaactgtatacacatttttaactttttcccaaacgttagggtatacgttcatcaataacttagtatctgcgctagcacgtttgtactctggcattaatttaaatgtgcccccatcaatactaattttagattcccctaactcttccatatcagaaatgatactactttttagctcatcaatctcttctttaatacttttttgcaattcatataatttcttgtaagagcgtaagtccttctctagtagctcctttttttgtaaatctgttgttttcatacatatctctccctctcttatttctataataagattatagcatgtcagatatgtaaagtcaacacttttttatacaaaaagaattgcccattataaaggcaattcttgtccgttgtcttcttcaaaaagaatctctacaggtatattatataatttagcaagttttactctgtttttaacacgaggttcttttataccgttttcccaataagagattgatgaccagtgaactcctatcatattggctaactctcgtagagattcacccctagcctctctcactcttttaaggactttaggttttggtaccttttcttccatgactatccctccttattcttaaaaaataagagcctatcaggtagacaggctcagcatcaggaactatgcgaaagccccgatataagttactttaccattacatttacgtgcaaaagcctctaactctttacgagcacctaaacggtcaggttgcgaagattgaacagtaatttctttaggtaccgttacttcacgtgtacgaatttcagttttaccattttttaatttcttctcatactcctctgtacgagttgttgtcgtagaaatgattccataaaattttttcatattaatagctccttactgttttttttaataaattataatagtggtaatagggttttatgagactcctactcattgtaagccttccttaatagatacttacaactatacgtttatagacctctctcaaaaagtctccgtaacgtcttaccttcatcatttaaaacgtacacagaatttacaaaagttttatacccttctttttcagttctgtactcgtaaggtgaatttggcacacgagtgatttcttcatgtttagagttaagtaatgaaaaagcattctcttgctctaaaagaaactgtaccccatcaattaattcaataaaaggcttaacaataggttcctctgtactgtctttacaatcgtattttcgttctcctaaaatttgtagtatcatgtctatctatctcctctgtttaagtattaatttgtgagtttccactcacaatgctgattgagagagtcgaactcccattcccgggttacaaaaccggagtaatagccattatactaaatcagcgtaacccctcaatagagggagtttcttatactaaattaccatatccgtaggtatttgttttagcttgtttaaacatgatactcttgatagctaagtcattgtacttttcatcgtcttcgtcatcaaggtacacatcaacattaacgttcttacctaaaatatcgattgtttcatctttacctacttgtaagtctttactgttaaatgatacatcaaaatagatgtcgtcttcttttgtacgactaccgaatgatactctatcttcaaataaatttaaacttcgagagttaattacaacaggttgtagcccaccttcaaattgaatagtaactgtataatactgattttcaatattaagaatgttcaaatcagcaatagcttcaccaaatgagatgccaaagcttaattccaacgcaattgctcgtaagcaatcatagtttaacttaattctacggctaaacttaacaacactgtcaatttccccatagtaagctttgtctaacttatcttgcaagtaagtacgaatttcgtctgcatcagggtagtcgaaacgtaaatgataatggaaacgtcccggacgattaagcataaagtcgtttacacgatttaagttattaacagtaagtgcataaatacgcttgcgttgtgataacccatcgaataagctcaatagtttttcttgtgattcacgaccgtcacggtcattgaatactttttcaaattcatcgaacaagataagagactcttggtcaatactgtcaataaattctgcgatacccggataagcttctgtaattaagataacaggcataccctcttcaatagctcgttgagataagatttgagtaaatagtgatttaccaatccctttatccccacttaaaataacccctaaactacgattgattgttttaaatgtgtgtagtactttctcaattttaactaaacggtcaccataaactttagattctttcaatttaaaatcgtctgtaaccgccaatgagaacccagacattgggttgaatctaactttataagtttgcgcaggcaacttatcataagttttcaggtcgtttgcataaatctcataattactaccataattgattactttcatatattctctccttaatactttttaataaattataaatggagagtgatggagtcgcaccacccgagcctaagcaacagatttacagtctgctccgctactacttacggaataactctccttgaataaccaaccagataggtacctgacacacggacagcacctgtgtctctctgttactggatgattaattgtgtatttcgcatcacctaatatagttatcaaggtaggacttgactatactagatttagctaggttctaactataatttcctatgatagctcctactactaatcatatttatatacagttaaactacacataactaaaccgattaccttggttcgcatgttaagaggcgcaggcaaccaatggacattgcaggtctcgaacctgcgaccgttcggttatgagccgaatgctctgaccaactgagctaaacgtccgtagggtagtagcaacaattacaaatgctactctcctgatgattataaacttatcaaatcggaaagacaggacttgaacctgcgacatcagactcccaaagcctgcactctaccaagctgagctactttccgggttacctgtttaatttggtcttttaaactactacacacaggtaaagataaaccctctgcaaaggggagactatcatcgaaccgtatgtaagttgcgatgggtagtagccatattatattaggttattaggaagttcacctatgcagaaggtgggagtcgaacccacacgtccattacagaccgatgtttctaagacaccgttgtctaccagttccatcacttctgcggttgtactaccaaggttacctctaaaaggctaaactcgtgtctggtagggagccataccttacatggattgcaaggaacctaacctcagtagtaccttttactattaagggtttctgatttaacgttttccctagaccgtaccttaacagtaatactggtgagaggatttgaacccctcttacctacgagcctccgacaagcgctatgggagacaagcggtgcattaaccataactatgctaaccagtacactactgttttacgcaatccgcatattagtagttcgcacggactcaaccctattaagggaagtggcagtctgattttttggtgggaactatctaactacttagaacattagatattcccagactgctcacttacattgttatttaatgtcacatgccttatgacagccgtactcaaaagtttcaaggacttttacctcactatccaccgacagtatgctcggcaacgtctttctaataatacttgttaaacttagggaggtataacaagtatgtgcacataacccgagtgctactccctaaagtagcctatacgggttaacgtagatggagggaatcgaacccccaaccgtccgcttagaaggcggatgctctatccgattgagctacacctacaaattatgggggtaatgagcccccataataactcatagtagtttcatctatcgaggattaaaatgaatatctaacttgaataaagtataacactatttacatagcatgtcaacacttttattaaaataaatttctatacctcactaatgccaatgactatacgtaaggagagaacgttgatggcactggctacttagttggcgctaagttagtgaggtatagaaagagaactacattgaccgaatcgtattatacagccttagtagttgttaacaatgtttggaacttagtagcttattgcaataagctaccccgaagcatcggggtgggactgtggtaagccccaaacccttgggtatgctccatcctgcctccggagaagtcaggctcaattctcattagttaaaggcttactagttaacggttagctgattagtcatactacgtaaactactagtaaaatatagttttccaattaaggctaacaatcggtagaggatttgaacccctattattggttttggagaccaacgtgttaccagttacactaaccgactatgtaaagaaggaaagcgaagaccttctttacagtaattaaaaaaacaaacaaaaaaaaatacaatcatggaatcaaggtgggatgtaaggagatgccatgtgtccacttatagtggaataggtaactacagatttgcactgttttacatcttgtttaatggttacctgttaatagctaacttccagtgataagtcctcttatatgttagttcatgtagtatttgtttgacaatatggtagctatctaaaatgacgacagtaacgggactcgaacccgtgtgttccacgctgacaacgtgttgggacaacctctgccctatactgccattatttatgccgtagttttttttagaaaggaaagttttttataatatacaacaacagttgaagcgctgatgttactacggcataaacatatttttatgagcttttaataactcaaaacttaatataatagggcttttactcctgcttcatgcacactcactgcattcggtcacatacccagagaggctgaactatcgggagctacctaatagcttctctctgcttttaatgtatggtctagcacggtggctaacaacgttcacctaaacattcagcattcaatagtattgttataagttcttcttatatcatatattttgtaagctgacttaggctacttgtaccaaggtctcttgttaaacccatatttctatggttctcgtcaaagggagtctttttaggtttctaaggtctgccaagtttctcacgcttccacctaacttagattcttttccacaggaacgtctattatatcccccaagagtcttgtaccttacaatccatgtacactccacataacgcttaactgatactagcttttactagtagttactcttatgtcaccataagacatacctgctacctaaaacactatcgcactctaggctacattcagaattacgccacgttatcctagcaagctgttcaaactttctgcactaggttctattatattaagttttcaattatcaaaagcagtttttctttactatttaataatagcacaacctctattattttgtcaactacttttttttagagagggtgcccctaattttatataggggcaagagatattaaacatagctgagctatgtaaaagctaatgtaggaattgaacctacttaatgtaagcaacaccagtttagcttataagcattgtttgcaaagtccatgctatgcactcagtaggaatcgaacctattgccgaaggtaccaaactaccctgagtgctcctatagatatattataccacataacgagatattaattttttttggtgatatagtatatctatatttttttaaattttagaaatacctttgatacattccggttatccaacgtatgagtatataatatcatgttattctgattgtgtcaataacttttttacattttttttataattgtgtaatgtcctatttctttttttctgattccttatatttattatttatactatatagtactatatatattagttactattagatattatatatatagataataagactctaggaaatttaaaataggacattctaatgctgactcagttacaatcaacttatggtggctaccttttacaaaaatgtcctatttcattttttctctctccttatattattatttataatatatagtattaagtattatatattattatatatatatagtatataatataagaaagacaaaaatttaaaataggacattttacttaaacaaaaaaaaagagagcagttaagccctcttatcttaatgagaaatagttattaattgttcccaacctgatttcctcatcttctggtgtttcatcctctggtttcgtatacaagctagtgattctttctggaacatctactacgttctcagtagctgtctgtatctggaatgcatttacataagttaactcagaatctctatcagctagtttatgaactggaatcattggcaactctgcacctttcattgcaccatttacaattgacattgcatcattagttgttacaccgagtcttctagggaacacagaatatgtcccagatgttaatgaaacctctacaactttctctcttttagggtaattcatgatacttctcctttcaaaatatgttataataatactatataccataataacacattttacaaattacttaaacatgctgaacacgtaagtgacaactgctcctaagacaatcataaaaacgttctctacaatatccctcttgtggtcgaactctttatcgtttactccttccagtgcatctatagtttcttccaacttagtaatctggtaggttaggtgtgcatatttttcttcgtgaacagcaagtcgcttatcaagactattgacaatatctctcaactcactaaccgcactattcagttctacattgtcctgtttaatgcccttctcggttagctctccatgttggagtttatcttccagtcgttgtagtcttaaaacaaggtcatttacttggtaatcgttcatatatgctcctccctgtaagttatgttgctctatattagtcagatgtaaaccacagacagactaatatacctataatagcgcctaccgtgtagactataggtatatagtacccattaaaaaacaagtatagactacctatactaattccatagagcacgaaagtgaacttgtatgatgccaaagggctcagttctgcttgtagtttcttatactgtagtgcacgagtgacatagtaggacatcaagtaaacaaacatttgcagtaacagtacacagaccagtgctgtttcatacattatgttgttccctcctctcccttagagctactattaatatagtacactgagctgttagcaaacaggtgtgctaaattaatatagagactaaaaatgtagacgggagagtggtaaaaatggataatagcaaacgaattattaaaaaaattatttttattaccatctctgcattagtcatggttactttaagtaagctgttctctaaatatgttattgtagaacaaaatgccccatttcaggcattaattggcggtgcctcatgtgcattgctatctagtattctgtttgattggtatactaataaaaagaaaaaagagaacgtagagaatcaacttaaagaagcaatcagtgacttgcagaagattaaagctatcataaaaagatagcctattaggaggtgggatgggtgtctattaccaataaagacattaaggataaacgtagatatatttttagtcaatctagtaaaacaacaactataaaaagaggggacaaacgcataagtagtgcaacaagaatatgtgcagtttgtggaagaccgctgtctaagctcgtattaagaacaggcgtaccaacagtagtagtagaccatattagctgtaagatttcagacattgttagactaaatgtctgtgaggatataaggtcttgttatgcgtattctagtaagaaaggggaaagctagctaatgggtatggcagatagacttaaagataatgcaaaacaaaaaaagttagaaagaacaccagagcaacaactaagagacacatttaatcaagcttcaataaagcttatcaatcaatttatggctaacgttacatcaggtgctatagaagttgatgatattgcagatttaacaaggctatttcagatttatttacaggttaataatataaatgatggaatgcaagaaggtacaggaactctacctgcacttacatctgagcataaagacatcatatctgaaaaggttagcacagaaaagattattaaggacggtgaagaagaggagctaatttctcttgatgagttagccagtcttccagatgaccaacttgaggaagtcttagttaacagagagctacagatgaacagagagaacgaggcgaccttctaatgacgacaaaagcacaacatatagctaaaatggctaaagagatgtatggtacggataaaattacaacggagcagttagcttatataacagatatgctgaccccatcaacgtacctattgagaaatcactctgtgcgtaatcacccaataacttttattatatcaggaagggatgcaacaaaagcacaggcacaccgaccttggcaaccaaagataataaatgaccaacatagagacaaggcaataattaaatcaagacagctagggctatcagagatgggtgttggttctatgctacagtttgcagacacacatagttatgatgctgttaaatgtctttatacatttccaacgaatgaacaaatgactaaatttgtacagacaaggttagaccctgttttacagaatgggtactacagcacaattgtagaccaagaagttaactcattaaaagctaaaaaaataagaaatagttttttgtattttcgttcaagctcaaaaccgggcgctgtagagggtgtcgatattgactatctatctatggacgagtatgaccgtgtacctgcattagcagaggcttctgcgttggagtctatgtcttcatcaccttataagatagttaacagatggagcaccccaagtgccccagatatggggatacatgggctctttaaagggtcagaccaacattggtatttacataaatgtgagaaatgtaattattataacgaaatgagttatgatgcatatacaccagaggctcctgtagagagtagaggtaacattctttgtgttaacccaaaaggggtcgatgttgttgctaaaacagtagttgacggctcattccagtttgtttgtcaaaagtgtggagaaccgttagacagatggtacaacggtgtatgggtacctaaatatcctgatagaacaaaaaatggtctaggtactagaggatatatgatttcccaaatgaacgcagtatgggtaactgccgaccagttaaagaccaaagaacttcaatcattgtctaaacaagccttttataactatactcttggatacccttatgcagacttgaaattaactgttaacgactctgacgttgatagccataaaagaaactatttagtagaacctgctaaagacagaggtgactataaatttatatctgttggtattgactggggtaacagacattgggtatctatacatggtgttaaaacaaatggtacggtagatttgataaaacttttttctgtgggtaagtccaacccgctagaccctaatgcaatagatgtagacatacagtctataaaattacaactagctccttacaatccagatataatcgtagctgacgtaggggactcaggggataaagttgctaaacttatgcaaatttatggaaaagaacgagtttttgggtgtgtctacccatcaacccctaaatctactggtaacctagtacctacttggagcccacaagcaaataaagtatccgctgacaagttaatgcagaataaacgttacattaacaagatgaaagaaggagaaataggttactactcaaaaccagatacagagcttaatttatataaagagcactggaagaatgttgttatacgtgatattgaggacgaaaagacatcgacaggttttagacaaattatcggcagaaaaggtgatgaccactactcacaagcaagcgtttattccatgttagggtatgagtacctaatgaatgtatttacaggagtaaaagagtatggatttgactctgattgggtgtccactcagttagcacctacgaaacctgatatatttacagaatttgtataggtagattgccttatttagttttagtcaagctgaataaggcattttgtattgtttgatatatatttttgtggtataataaatatagttagggggatagttatggtagacaacaatgtaaaaataagtaaaagtacaattgaaggactaataaataagtctttaagttatgagtacgttataaaaaataacgaattgctgacaaacgaatatcaacatattgtaaaagcgtatgggtttgacaatttttatgacatgtatctatatgcagatagctgtgattctaaagatatgtatttagtaaaaggtggtcaaaaagacttgtctaagctaaaacctgttaaaagaaaagttgttagaaatggtaaaactatgactacaactatttatgaagatacaggcagttcggacaataataacagtaaccctttagacaaagagagtaaaaagaaaaaagagttagaaccagttaatgctaaggaactacgtaaggttagcttaggtagtgatgaagaagagaagttagaccctaaaaagatagcaaaattgctagcagacactaaaaaatttggaaataattttgatacgcagtgtactgattatcttattcttgaacaagactctgttacacgaggagtggtagggtttactagagaaggttcttatttaaaaatgtctttctcaatgtcagatgaggctgttgagggtatgaagatgttagctttttcacagctcacattaaaggcttggaaattgggtctaggggctaagataagcacagataatgcacctgatgtagaggaactaattagcttatatggatacaaaagaaataagacagagtatattgtgtcaatgagctcactgcgtagtcttctaggggagccttagtcataagtgctacgttagtcattatactagtattttcaactattatttttttaatttttaatttactagtaagtaaggtagttaaagaattttataacttaaagatgctagcaaaagagggactaacagataaagtaacagatataacaaatgatataatgcatatattgaaaggagaaataaataatatggaattaattatgaataataagaaattagatgaattaactaataaggtggctactgatgaggactacgatatttttgtagagaagatgggtaatctagtcaaagatttgtatgagaactatcagtttttacaacaaaatccaccagaaggagactacacatcaggttattttttagggttccaagtaatcagagcagaatacccagttgagtatgagaatttatttagattagctgtagataaaaatttaaatgaactagagataaataagagatttgtcgaagctgttaaggatggcaaggttttaccattaggtgaggctgtcattgatgaattacaaacagggtgtagctctatactacaggcacaagaagtacgtgtaaatattgtatttggtacaaaagaatacatggctaagcaagaagaagagcgtaaagaacgtcaagctaagttagaagaagaacgggaaagagctatggaagtactaaaaacaaaagatgacgtacttaacacattaagagtaaccgaggctttggctaatgaattaacagacgaagtcgcagaaaaatatgatttaatggagctagttaacagtatgagagaggggctgaaagctcacaatggaaattaaaaattctttggggaaagctcttataaaaaatttaagattgcttaaagaaaaaagagatgcaatgcccgataacttagagtatacaagtcaagttatgattcctgtgccctactatctaataaaaaaaggggataacgcagtagaatcattccttatgtgtgcggggatgataaataggaataaagatttaggtttacctatttctttagagaaaggtaagcaacaagttaagcttaacaatggagaactaacaaccattgtagaatgtgttgctacctactcagataaaactgacattgacggtgtagagagattcttagttgaacatctataaaaattaaattaacgagttctattttgtgctatattagatatgcatgaaatagaacttgtttcttttttatgactaactaaggaggtttaatagatggcaggagaagtatttagtagcttgattacaagtgtaaatcctaacccaatgaacgcaggtagccgtaatggtatcactatcgacaccattatcctacatcacaatgcaacaacaaataaagatgttgctatgaacacatggctattaggtggtggcgcaggtacatctgctcattatgaatgtacaccaacagaaattattggatgtgtcggtgagcagtattcagcattccatgccggaggtacaggtggtatagacgttcctaagattgctaaccctaatcaacgttcaataggtattgaaaatgtaaactcgtcaggagcacctaattggtctgtagaccctagaacaattacaaattgtgctcgtttagtggcagatatttgtacacgttatggtattccgtgtgaccgacaacatgtgttaggacataacgaagtaactgcaacagcatgtcccggaggtatggatgtagacgaagttgtacgtcaagctcaacagttcatggcaggaggctctaacaatgcagttaagccggagccaagtaagcctacaccaagcaaaccaagtaataataaaaataaagaaggagtggcaactatgtattgtttatacgaaagacctattaactcaaaaacaggagtattagagtggaatggtgatgcatggacagttatgttttgtaatggggtaaattgtcgcagagtatctcatccagatgaaatgaaagtaattgaggatatttacagaaaaaataatggaaaagacattccattttacagtcaaaaagaatggaataaaaatgcaccatggtataacagattagagacagtatgcccagtagtaggtattactaaaaaatcttaatactagatttaagaccatcttacggtggtcttttttctttctttgtaatattcgtaataatatgtaatggctatgtaaccgcttgttcttttggctgtaacaattacatgttatattagttcttgtaagcaacacaaataaagaaaatattgaggagaattttattttgaagaaaactagtattttaggtttaagtttattaagtttaggtttagtagtaggtttaggaaccgaagctaaggcagaagaagtaacagagaatgggaagacatattggaaagtagagtcaggagacacactatcagaaattggagctaagtacaacttagacttcactaacattcataaagttaacaaaggtgttgtagctgaccctaatgtcattttcgtaggtgacaaatttttattacctttagatgaaaatggcaagctagtggaacaagtaaataccactgagccagatattgaagtacaatataacgcaccagtaacacctgaacaacctgtagttgtagaacaagaagttgtagagcaacctgtagttgtagcagaaacccctgcccctgtagtagaggcacctgctgatagtagttcagcaaaagagtggattgcacaacgtgaatctagtggttcttatgatgcaacaaatggtcagtatatcggtcgttaccaattatctgcctcttatttaaatggtgactattcacctgccaaccaagaacgagtagccgatgagtatgtagcaggtcgctatggctcatgggagaacgcaaaatctttctggttagcaaatggttggtactaaaattaaatagcaataaagacctctttattaaggggtctttttttatgctatattaatatatagtaaatagtaatataaaatggttatgattagttatgtggtataatagacttatgttaaaaccatttaaggaggggaaacatgggttatattcaagatgagacatggcagatggttaaaaaagttgctaaaaagaatgggtttgttggtgactggattttaattatccactcatactatgagtatggtggaaatcacgtccagatacatacaacaataaacggagaaagctatagaattttaaggttgctagatagcagagagatacttttattagatagaaaaggtaaccctgtaatttatgattacgaaatagttaatgatggtcaaaaaagcttcttttataatgatatggaagagaaagaaatcgaaatacctaatggaagatgcttaaacgataagacaagggtaaaaatttatgtataaggtaggtgtaacagttgccaaaatggttagataaagcactaggtatagaaaaatcgtccatagaagaaactcggaatatggaaaattataagatgcatttaagggaaatagacaccaatgtggtcaataacgagccgtatagcatggaaagtattgaaaaaggtatgaatggcaagaccactgcatatatgcaaccaattattggagagatgtcagtaaaccccgggtataaaactaaaccgtctatacgtaactctcaagacttacataagacacttaaaaagtttggtaataacataatattaaatgctattattaatacacggtcaaaccaagtatcgatgtattgtaagcctgcaagaaactctgaaacaggtgttggttacgagatacgtttaaaagatattgaagcagaacctacttcacatgacattgctaatattaaacgtattgaaagttttttagagaacacagcacaatttagagaccctaatagagataactttacaactttttgtaaaaaacttgttcgggcaacatatatgtatgaccaagtaaactttgaaaaggtatttgataaagatggcaactttatcaaatttgatactgtagacccaactacaattttcttagcaacaaatggtgaaggtaaactaattaaaaatggtgaaaggtttgttcaggttatcgacaacagaattgttgccaaattcaatgagagagaactagcttttgctgttagaaaccctagagcagacatagaagttgggcaatatggttatccagagcttgaaatagcactaaaacaatttattgctcatgaaaatacagaagtatttaatgacagatttttctcacatggaggtactacaagaggtatcttgcatgtaaaaactgggcaacagcagagccaacaagcgttagatatatttagaagagaatggagaagctcactagccggaataaatggttcatggcaaatacctgtagtatctgcagaagatgtgaaatttgttaacatgacaccctctgctaatgatatgcaatttgaaaaatggcttaactacttaattaatgttatatctgctttgtatggaattgaccccgcagagataaacttccctaataatggtggtgcaacaggctctaaaggaggttccctaaatgagggaaactcaaaagagaaaatgcaggcttctcagaataaagggctacaaccccttttaagatttatagaggacaccgttaacacatatattgttgcggaatttggagaaaaataccaattccaatttagaggaggagacctaagtgctcaactagataagcttaaaataattgagcaagaaggtaaagtattcagaacagttaacgagataagacatgataaaggtttagaaccgattaaaggcggagacgttatactaaatggtgttcacatacaagctattgggcaagcgttacaagaagaacagctagaataccaaagaagccaagaccgcttaaacagactattagagctatctggtggagatgtggaacaaccagaaccagaagaacctaaagacaatcaaaatgatacagatgtttcatttcaggatgaacaacaaggtttaaacggtaagtctaagaaagttaatggtaaggtagacgacaatgttggcaaggacggtcagttaaaatcggaagaaaacaccaactcaactaagcatggtactgatggtataaaaaaataataaaagataatggagggggttagctcccccctcaactttgtttgtgttactagatagtacatgttctgctatattaaatacagtaaaacgtttaggtggtgaaaagcaaattgtcagaagttagagaaaaatatagtattttcgtaccactggatattgaaaattctatacagaagtctgaatctgtgaatgatggtgaatggtatgtgcaaggatatgcaactaccccagatttagatttacaaggggatattattttaccacagggcattgatatttcttattttattgaaaatggttggataaactatgagcataaaaatgatgctgagtttattataggtgccccaactagcaattgttatgttgatgtggacaaagggttattcgtagaggctaagctattaaaggataacaagtacgcacagtctatgtggaagctagctaatacaatccagaaatcaggaatatctcgtcagttaggtttttctattgagggtgcagtagttagtagaaatgcacaagataacagaatcatagaaggtgttaaaatacataatgttgcattaacgacacatccggctaacccaagagctacatgggagacactagttaaatcttggactacaggatatggtacagcaccagatgcacaagtagatgcaggcgcacttagaagagagatgtttaaagaggacatttctaatttgacgtatgcagtaagaactattgcagggctatatagtaaaaaacctgcagagaaagaatttattttacgtgaagtagctaaggatatagaagtagacacttccgaaaatgaattatctaaatttatgttacaattaagtagagggatttccttgaaagaagcaacaaactttattgaaagaagaaaggggtaagaaatagtggctaaaacattgaacgatattatagaagattttgatgcacagttaaatgaaaaagtaaaacctactacagatgaggaaattacaaagtctgtagaagaacctactgaaccagaaaaagttgaagaaggtgctgaggttgagcaggaagaaaagcctaatgaatctgaggaaactgcaggcaatgacggagaagaatccggagttactgaaacagttgaagcagaacaggaagagccagaaactgttgaagaagtagtggttgaagagcctgtcgaagaatcagcagaaactgttgaaaaatctgataaaactaaagaaaataaagatgaagaagaggaggaagacgaagaagacgaagacaaaaagaaagaaaaagacaagaaagacaaagataaaaaagacaaagaagataaagaagacatcgagaagtctaccgaagtcgaacaagttatcaaatcttctgaaatcttaggggctatggaagctatctttaaaaatatgttaggtctaagtgaaaagttagacgaaattcatagagagtttaaagaagctaaagaagctaaagaagctaaagaaaaagacgaagctgaatctgttgagaaatctttacttgacaaccctgaaattaaaacaggaaaagaggactcagaaggcaaggctgttggatttgttaataagtctgtagcagttgaggaagaggtagctaccgaagagccaactgtagatgtagttgttgatggtgaacaagacacagcagaacctgaaaaagaagtaccgttccgtgatagagtacaggctattagaccagactttatggaaacatataaacgtgtgtctgttagcggagtagctcaacgtggtgaattagaatcagttagacacacttggggaactgctagaacaaatgaagacctagctaaaattgaagggtttatcaataaatataaataattttactatatagtgaacgatttttaattgtactgctatattaatagcagaaacaataaaagacctgacattccctcctgaacctccacagggtcaggtcttatattgagaggaatataaagaaaggtgatttatacataatgacagagaaaaagaatacagaacgacaattaacttccgtacaggaagaagtaattaaaggcttcactacaggatatggtattacaccagaatctcaaactgatgccgccgctttaagacgagagttcttagacgaccaaatcacaatgctaacttgggcagacggagacttatcattttatcgtgacatcactaaacgtccggcaacttcaactgtagctaaatatgacgtatatctagcacatggacgtgtaggtcatactcgttttactcgtgaaatcggtgtagcaccaatttcagaccctaacttacgtcaaaaaacagttaacatgaaatatgtttctgatactaaaaatatgagtatcgcaacaggtttagttaacaacattgaagacccaatgcgtatcttgacagacgatgctatctcagttgttgctaaaacaattgaatgggcttctttctacggtgactctgacttatcagaaaacccagatgcaggttcaggtttagagttcgatggtttagctaaactaattgacaaacataatgtactagatgctaaaggtgctagcttaacagaagctttacttaaccaagcatcagtattagttggtaaaggttatggtacaccaacagatgcttatatgcctatcggtgttcaagcagacttcgttaaccaacaattagaccgccaagttcaagtaattagcgacaacggtcaaaacgctacaatgggattcaacgttaaaggttttaactctgcacgtggtttcattcgtttacacggttcaactgtaatggaattagaacaaattttagatgaaaatagtatgcaactccctaatgctcctcaaaaagcaactgttaaagctactttagaagcaggaacaaaaggtaaattccgtgatgaagatttaacaatcgacacagaatacaaagttgtagtagtatctgacgatgcagaatctgcaccatctgatgttgcatctgtagtaattgacgacaagaaaaaacaagttaaattagaaatcactattaataacatgtatcaagctcgtccacaatatgttgcaatttaccgtaaaggtttggaaacaggattgttctaccaaatcgctagagtacctgcaagtaaagcagttgacggagttatcacatttatcgatgtgaacgatgaaattcctgaaacagcggacgtattcgttggggaattaactccatcagtagttcacttgttcgagttactaccaatgatgcgcttaccattagcacaagttaatgcttctgtaacattcgcagtattatggtatggagctttagcattacgtgcacctaagaaatgggctcgcattaagaacgttaaatatattgcaacaggtaacgtatttaacgaacgctaatctttagaagactaagcaaaattgaataaaaatggaataggggacggttaatactgttccctatttttattataaaatacatgtatggaggaaataatatgttaaaatcagaaatcttaataaataaaacagtaacaacagcttttggtgaggtaacatttgaccataatggggaaaccacagacctaacagtagaacagcaagaacatttagggactaaagttccatatatacaatatataccagatgcacctaaagctaaagaaaaagaagctactgcagaaaaagcagacgaggcacctaaaaaggctaagaaagcgcctgctaagaaaactacaaaatctaaaaaagaggaagactaaggaggtatttatatgtacccagactacggatacgaggaacaaggggacaatacataccaataccaaccatatgcacatgggaaccctaagcatatagatttagacaaaattgatgatatacagcctgctgattatggttggacacctgctacgctgaaacaatacatgtttggtgtagaagttgttaaccctgaaacaggggagcctttaggagatactttctatgaacatatcatagattcagcaatagctaaagcagagaaacgactagatattgctattatgcctagacttataagaggagaacaccatgattaccaccaatcagatttcaactcttacatgtatactcatgtgtttaaaagacctattattcaagcagaaaagcttcaattagaagttaatggtagagggctatacagatacccgtctaattggtggaaagtgtatgcactagcaggtcatatacaaatgtacccaacatccctcatgcagactggaacacagtttggttatgaaatgacgttctcagggtacccacaattagcaggaatgcctccatcaggaggacaagttgatgctcctcaaatgattcatattgactatgtggcaggaatgctacctaggaaaaatagaggatacaatgaagactgggagtgccctgcggacttagaacagcttgtaataaaatatgcgttaaaagagatattccaacaatggggtagacttataattggtgcaggtattgctagtaagtcactaacagtagatggtattagtgaaagtatacaaacaacacagtctgctatgtatggtggagcttctgcagatattcgacaaattgacgaagacatacaagaattagaaaaatcattggtatcttactttggaatgaacttaggtattatttaaaaaagggggttaacaaatgggtgaaaaaccaattagatttggtggagcaggtgaaacaggtaaccctaacaagcaattaaatactagtagggttgaatttgaaacaaaaggtatggctagcttcattgaaaatagaggtattgacgttttgtgggaaagagcatggctatgtacatgtcgtaacccaatgaccctctcacctaagtcggattgccccatctgtaggggaagagggattgcttaccaacctgcagtaaaattaagaatggctatacagagtcaagagaaaggtatctctaatcaagatttaggactactagacacaggaaccgctattggaacgactgagctagattctaagataacctttagggacagaataacagtccccgaagttaaaatatatcaaagctttatttttaatgtaaataaaagaagagtagctaatggactatttttaagctatgatgtgaacagtatagaagatatttatggtaaagacggacgtatcttagttgatggagtcgattttagaatggactatgacacaaatactatttacccaaatgaatctttgatagatactaatatatccataaatatgtctgttacacttagatatattgttatagacctgttaaaagaaagcagataccagtataccacattcggtgttaaacaaacacaatttgagtcactacctaaaaagctcttattgaagcgtgaggacgtgtttattgatagtgaaccattttcattagacatagatacagcaagccgtatggaagagctagagggcaaaaaagatacaagtgaagctatggtagaccctaagcgtaaagctacaaaatcaggaggcttctttggaggtaaattaaatggctagaaaaggacagagacccgtattgtttactgattcaaaagcaatacttggcaatctaactcgtgcagtggttgatgaagtactaagtgatgcgcaagatgttgctctacgtaatgggtcttctgtacagagaatgcctagctatttgatagtaacagagtctaggatggcaaaaaatggggttatagacttgaaacctttctttgcacgttctaataaaaagaaatataataaaaaaggggaatggtacctatacatccctattagtatgaaaacacgcaacatgtcaagacgattatacgatgagttgagagcagttccagtaggcacaaaacctgtaactgttaaaatggactatctgtatgatagacgaaagcagagtccatcagtgtctagtattaactacaaacctaaatctactaatgtaactgttataccacagagttggggtaaaggtacacgtaacacctatgtagctttccgtacagttaacgctaattctcctgcgaatagttggataataaatcgtagaaacgttaatgatgatgatatgagtaagacaatgctaagaaacatagacaggctcatgaaatggaaactaaagaatttaggaggatagtgtatgataccaagtttagacacttacttgtataaagaatttgaagaaagactaaggataattctgtcagagtgctatattatagacgaagctttaaaggggatggacaaagaagctttagaatcttttaaaaacacttattgctctatagatggtaagccacctaagagagaagtagagatgtcctattcattcccacaagaacatctggattcatttgctcgatttgtagtaactctcggtagtagcgaagaagatagcaagtctattggaggaatccaaggaggctacgagtatcgagaaggtaatgtaattagtgaggaagccactattattagagaaggtgacaagctaattataaatacatcaaaaccagtagcggactatctaaacagctcagatataagttttgcagaaagcgaccattttaggattgaagataacaaacctgtatttgatttttcatataatgaggagttagaaggtatatccattaatgtgtcgtatataagcaaagtatcagatgatgatgttgcaggtgtatacaaaggataccaatctaacgataatgttagtataattggaataagttctaatatagatactgctaggtgtttagatgcaattgctagaattatactaatcaccatgagagacagtttagatgaaaaaacagggtatatgttgcaaacactacattttggtgatatgcaagttgtcatagaatcaggtgaaacacttgtgtttggtagaccttgtactgtaaactacagagttactaattctattggatttgatttacaacaaagaatcacagagattattacaaaaaggaggatgaaatcctagtggctaaagaaacagagaaagtagtaaaaaaagaagttaaaaaggagcaacctaaaaaacctaaaggttatgtccatgtcgatacatttttagattatgcaaaagtattatatggactaaataaatatcaggtagcgggtttcagagcactaatggcaggtagagaataccaacacgaggatgctgattttgttccatttttagaaaagtatataggaaaggaagttaaataataaatggctgtagaacaattcccaagaaaaaaagtatcacgtccacatactgagattaccgtagacacaagcggtattggtggggcatcaagtagctctgacaaaacattaatgttagtcggctctgctaaaggcggtaaaccagatactgtttatcgtttccgtaattatcaacaagctaaacaagtactacgtagtggagatttgctagatgctattgagttagcatggaatgcatctgacgttaataccgcatcagcaggagacattttagcagttcgtgttgaagatgctaaaaacgcaactcttacaaaaggtggtttaacatttgcttcaacaatttatggggtagatgcaaatgaaattcaagtagcattagaagacaacaatttaacacacacaaaaagattgactgttgcattttctaaagatggttataagaaagttttcgataacttaggtaaaattttctctatccaatataaaggtagtgaagctcaagccaactttacaattgcacaagataaaatcagtaagaaagcaacaacattaactttaaatgtaggtgctgaaccagaaagtacaacagaagtaatgaagtatgagttaggtcaaggtgtttactctgagacaaatgtcttagttagtgcaatcaatagtttaccagattgggaggctaagttcttccctataggtgacaaaaacttacctactgatgctttagaggcagtaaccaaagtagatgttaagacagaggctgtattcgtaggagctttagcaggagatattgctaaacagctagaatacaatgactatgtaactgtagctgtagatgctacaaaacctgtagaagactttgaattaacaaacttaacaggtggttctgacggaactgctcctgagtcttgggctaataaattcccattactagctaatgaaggtggttactacttagtaccattaacagataaacaagcagttcattctgaggctttagcttttgttaaagaccgtacagacaatggtgacccaatgcgtattatcgttggtggaggcactaatgaaacagtagaggaaagcattactcgtgcaacaaacttacgtgaccctagagcttctttagtaggcttctctggaactcgtaaaatggatgacggacgtttgcttaaattaccgggttacatgatggcttcacaaattgcaggtattgcaagtggtttagaagttggtgaagcaatcactttcaaacacttcaacgtaacatctgtagaccgtgtatttgaaagtagccagttagacatgttaaacgaaagtggagtaatctctatcgagtttgtacgtaaccgtactttaactgcattccgtgtagtacaggacgtaactacttacaatgacaaatctgacccagttaaaaatgaaatgtctgttggtgaagcaaacgacttcttagtttcagaattgaaaattgaactagataacaacttcatcggaactaaagtgattgacacaagcgcaagcttaatcaaaaactttatccaatcattcttagataacaaaaaacgtgctcgtgaaatccaagattacacaccggaagaagtacaagttgtcttagaaggtgacgtggcatcaatcagtatgactgtaatgcctatccgtagcttgaataagattactgttcagttagtatacaaacaacaaatcttaacagcatagagtgtaggggcagttgcccctcctcttacataatgaataaaatataggagtgatatatacatggctagtgttggaaatcaaacagtccacacaggtaacacagtttacctaatgattggtaataaaattatcggtcgtgcgcaatctgcatcaggtgagcgccaatatggtacacaaggtatctatgaaatcggtagtattatgccacaagaacacgtatacttgaaatatgaaggtacaattactttagaacgtatgcgtatgaaaaaagaagacttagcaagtttaggaattacagcgttaggtgaagacatcttacaacgtgatattatcgacatcgtaatgatggataatttaactaaagaaatcgtagtagcttatcgtggttgctctgcaatttcttactcagagtcattcacagctaacgaagttacatcagaatcaacccaattcacttaccttacaagtgcaaaagtaaaataacaataatgttaaccacccacattgtatgggtggttattttatgttatactatttgtattgaataaaaaaaagcttaaggagggcattagtagtgaaatatccatatttagtagaattgtatgcaaaacatgtaattagagactcagggtacatagaaaatgtaccaccagttatttatgaagacgttgtgaaacgtgttgaagaaataaaaagagaagaaaacttaacaatagattagctagtataagtttaaatagacctaattcagatataggtctattttttttgccactataaatacaaataactagatagtgtggtataataaagatagtgctatattaatttatgagtaaactaggaggaaataataatgacagaaaataatgaaaaggtatttacacctacaccaaatttatcacgtgagcaattaatagaaaagttgcaacgtggagaaaacttgacggatgaagaagtaaatattttgaaatattacaatgatgcagaagaacgtaaacagttagatagaattatcccgggtgttaatgatgtattttctaagcattataacttaaaagaatatggtttagaatttgatattaaaataaaagcacctaatattatcgaaaatggtaaaattcaggcaagaagagaagcctatttagaaggcatgggaatggcagttagcaactttattttccaaagttaccaaatgttagcaactattcgagtatgtggggtagaggtaccagaagtactagctgatgatgaaaaaatttataatttatatgtattaggagtaattgcaaaggactatggtgaatggctaaactcctttcgatactagagttaaagaactaggtggaataaaagccctcgttagaaataactatagtagaaatctatgggcaataatgaaaaaattcaaggtactaccgagtgaccctgcgtggcaaaatctcacaagtgaccaagtagagtggattttatataatatggaaagagacatagaagaacaagaacgactagctaaaggaatgcagttagaaagtgagttccaagactatgacgattcatggtatgataaaccacatgatgagttctccccaattcgtgaaggtgacgatgaggaagaaattgctcgtaaacttagtgaaatcacaagtgaggaagacatggctaaacttaaagctcgttgggaggcaagccaagaagttgatgctatccgtgcagaaggtggaacaacaattgaagaagatacgattaacgaacttattgctaacaatgttaaaaaagcaatggaagaggctagacgtattgagaaacatggtggaaacaaatggcaagagaaatcatcaattgagttagaagaggaacgtaagaacctagagtttaactcacagttgaaacaaggagatattcaggaggctattgatttgtttaacaaagatgtcgagccaacatcattagatgacgaatttcaaatttaagggtagggcattccctgccctttacttgtaaaggaagtgtggaaatgagcaacaattatcgtttttatgttgaggcaatgactggggatgctgttgcaaaacttaatgaaatagacaagttaatggataaaattgattcaaagagtgcaaagggcacccagaattttttccatacaagtcagaaagacattgataaagctgttgaggaaatgcaaaagcttatcaaggcaaaaaaagaactagatagggcttttgataatcagaagataaatgcagaaagcatgggagacatgacagcatataaacgtgctgtatcggatgcagaagaactaactagaagatttaacaagacacaaaaagaatttcaaaatcatgctagaatgcaagctaaccctaattacataaatgctagtacactaaggcaacaaaaggcatttcgtgatgagttaacagagcaagaaagagcgataagaaatatctctagggcacaacaggaactaaacagggtgaactctagggttaaccatcgtgcaaaccaagcaagcgcaacaggaagaatgacttacaatcagtcagagagtatgaagcgtgaccttagacgtactggtgtatttgaaagcctaggttcagaaaataaaagcagacagcaagagctacgagaacgatataaacagagacaagaagagctagcagagactagaagtaatacaaatttagatagacaagttcgtaagaatagagaaactagtattcaggctgagataaaagaaattgagaaagaaattgaagctagaaaacgcctagcagactctattaaagagactgtagagaacttaaaatctaaggaagcttcactaaatgcatctgacataaaagtagatgctgatagaaagagtattcgtggtgttctagctgagcgtgcaccttctatatcaatggctatgctaggaggtaccgccgccgccataggtggtttatacgcaaaaggagcaactgctaatgcaggtatgcgtgatgcatctatatctttaggacaacgtacaggtactagtgatttccgtgcattaagaaaaagtatgcaagagatgggtattgagaaacagttaggctataaaggtgctgacatgttacaattccaagaagatgcattgagtaatattggttttacaagtaaagaggacttagcaggaagtacaagagccttagcagagggttcaagggcagttccagtagacaatgagactttaagtgacttcatgaatagccaaatgaagagtggagctattagtggtagagaccaaattaagaatattcaagaaggtttcttaggtgctatccaacgctcagggatggcaggtcgtgagaaagaacaactagaagctcttaaaacattaagtgagcaaagctttactggtcgtaacggaagtaatcaagagcttaaagaacaaatggcaatgttaacaatgctaaaccaaacaggtaagcgtgctgttcaaggtgaacaaggggcgcagttaatgtcaagtttatctgcaggtattcaaggtagtgtatggaacaataaggcatctttacttttaggtaaagggacacaattccaaggactagcaggaatgtacgacttaaaagctatgcaagaacaaggagcaacaccagagaacttacagaaaattattggcagtgtccaacaatcagttcccggtgacgaaaagtctcagaagtatgctttcggtagtgctttacacgaactattcggcacagatgctaagaatgaccaaatagatgcaatttgggaggcttatgccaacggtggtttaagtcaggataacgtagacagaataatgaatgaaagccaatctacaggaaaaggcaaatacgacaagaacatagaagactatgcaaactctaaagaaggaaccgctaaccgttcagaagctgttacagagaaacaagcttcacagattaacgatatgggggacatcttaagagaaactaactctaaattaggagcacttcctcctgcgttatatgcgttaggagcaggcttaggagctatggctgtttcactagccacatcaggctctattggtggtttatctagtttaatcaaaaaaggaactcgttctacttttagtacaggtggaggagtaactgcagggggcggatttttaaaatcagctaaagaagcattctctgcaggtaaaggctctggcggatggttccaaggtattaaaaatgtaggtagtgtagctaaggactccgcaatgggtgtcggagctaaggctgttgaaggagcaaaaggactaaaaggtgccggaatgggcagtaaggttcttggtggcttaggaaaagcaggtaaattcctaggcaaagttgcaacccctctagcgataggttcctctctactagatattgcaaccgcagatgataaaacaaaggcggtaggggagagtgttggagctattggtggaggtatcggaggagctaagttaggggcaatgattggtacatttattgcacccggtcttggtacaggtatcggaggagctattggtggaggtatcggcgccataggaggtactctagcaggttctaaactaggcggtaaatttgttgatggtgttcgtaaattcttcggaggagaagaagctcatgcggaagaagcagacttaactgcagggcaagatgttgcttctgggcaagagagtaaatcaggagtacaagaagccagagacacggctaacaaacgagtcctatctgagaaaacacgtgcagagaataacgcagaagagtccgccaatctctctatctattctaagttattagatagagcccaacgtatactaaaccaagcaaaaaatcaaaacggtatattcggtaactcagggagctctaaagattcttctgatggaatgggttcagatgcttctagtaaagactttggaggagactgggagaaagccattaggcaagcatctaagaaaatgggagtagatgtttctgacgatgaaatagatacaatacttagattgattcaggcggagtctagtggtgacgagagtgctgttcaacagataattgatgagaacaacttcaatggcaatggcggagctaaaggtttgctacagtatgtccaaagtacttttgatgcatacaaagtagacggtcatgacaacataatgagcgggtatgaccaattgctagctttctttaataatagtaattggaaaaatgacctaaattcttgggatagccgttatcaaaacggtggtacaggatggggtcctactggtaataaaactagagcgatgggcggacacataactagcccagagtatgcgctactgggagaggtagcaggtcaagatgagtatgttataaatcctagtcagccaacagctccacgtttattagcagaagctactagaaaaacagctcaaaacttccgattaacaggtaacggttctggtcatgattggggagcttcaatttctaaaataaatgcaacaggaggagctcaatcaggttcagctcctacgatgacaaatacaaatgaggtatcagttaatgtcaccatacaaggtgggggaacaagtgatagtatagctagagaaattggtgataagtcagcaggaattatcagcaaaacactcgatgccaccttcacagatttcttcgcaaaagaatacaggagagtgtagaggcttaatgtctctacttttctctaaggaggtttataatgtcagtagagttaagatacccgagatttgatttaactttttttacagagacagacaactaccatatagtttatgatgcaaaagatgggcttactggacgtaataacaataacggtgaaacagagaaggtaagcaataattttatggcagagtctgtaattagtttaactacaaaaaatgctttagaagatgatagtgcagtcttctccttcgtattagcaggggatgtgtattgggatagagtgctaaatgctaatgatgcagttattcttaaaatagacccagatacttcctccactaaaaaatcagataaccctgtactactagttggcttaatatctgaggtcagactagagggtgactatggagagaactctaagatgtacaggataacaggacagtcttttgcaaaggcattaatgcagttcgacttaggtgttattcaggaagtaagtgtagttttgacagacttaggttggttacctgacgatgcacaagaaggtataaaaatgtctggtagtagtgcaagtcaaatagcagaaagcctaatgaaaagatttttacaatatatgaaatttaattttaatggtcaaggtatagataagttcttagagtgggagctagatagttggacagaggcggagagactaatagatagtaccccttacataaactatgaaggttctttaaagcaacttatagatgatgtaaccgctaaaccgtttaacgaattgtatttcgatgcaacaccagaggggaaatgcagaatgattatgcgtagaaccccatttgataaatctgattgggaaaaattacaaacctacacagtaacatctgcagaagtaatatccgaatctgtagcagttaacgatacagaagcttactctatatttaacatatctattaataatttgtatgggactgactctatgatgttaggttctaaaccacaagtattccctgatttagtttctaaatatggttataagaaactagaagtacctaataggtatttagaaggagcaattatagataagagtaacagtggggataaagctaacacaaaacccgaaagtggtaatgatagtaaagagagtgatggctcaacagctaaacagatgtttgacagagagtacgctcttgtcttaaactatctaaaagggtatcctgttgatgtgctaagagttaaaaaaagtaatgtaaggacatcaataacacaagtagacagacgtataacagataacgaagcagataaaattatagaccactatattacaaatcaagcattaagtaaagaagacttttctaaatttacaggaataaccgaagaaaatatagaagagggtaacggtaaagtagagcctacatataccgcagttagggacttccttaatgggttagataaaaacctaggagtatctagcataaaagagaaattaatgaactacttcaatttgatacctaaccaagccacatctattgctagtgaatacaaagcacaaggtaacttaggtaaactaaaatatgaagaaataatggagaataacccaagtgatagctcaaccgtcactggttcagataaacgatttgtttctgagttcactaaaagactagcaaattggtactgtgaaaacgctaatttctacagtggggatattgtagttaaaggtgaccctaaatatagattaggtaaccgtttgtttgttcaagatgagcaaaatggtgagttgtgggaatactacatagaatcagtagaacactcgttctcctatacacaagggtatatcactactcttggggtcactagaggtttacaaaatggaggaaacgatagattcactcatttatggggtaaatctgaggacttctccggaggtatgctaggtgagaaaaccttgcaagcactactagacgaacaagcagaagcaaacagtaaaaatgatggaggctctgatagtggaggtagctcaggtaaagagtatacagcaggtgcaggaactcagctagcggtattcccattagacgtaattaatgtaactcagggagaaaatggcggatacagccacatgggagcacttgcaatagacttttcagatggtactcctcataaaccttactatgcaccatttgactgtgaatgtgtgtacactgactcttactcaggggttgcatggcaatctcaaaagcctgttaaatgtgtagatggtagcgttacttacgtaacactattatgcgtacacgacaacaactgggcaagcaacaaagtaggggataagaaagctaaaggggaagtaatagggcactcagggactgcaggacaagcatcaggagaccatgcccacttcgaggtgtctaaaggtaaatggcaaggttggagcacaagcagtgcgggagtttactttataaaaaatccttctcatttatacgatgtattttctataaaaaataatgtaactggaaaaacaactaaaattatgaatggtggagggtacaattggcgtagtatagactgggacgataaatctggttcaggttctggaaagaaaaagacagttggtgctagagccatggctactccattcggattacgtatgatgcgtagcgctcctgtagaaccagaagaaccaaaagttgttaaacaagtagaaactaaaacagttgttgaaaagaaaccaaaagtagaagttaaaaagctcccaatactttacgggaataacattgccacagaagcaactaaatggggaagagctcactcgaaaacagagtccacattccaatctgccttcaattttggagctaatacagataaagacccatttgaggaagacattatagcaacagacagtgcaggatttgtttggtggtgtttctaccatgcaggcatatcactatctggtggagctagaatggttaccactcgttcactactctatgataaccaattacaaactatctctactagaggtcagaagtctttagagctatttgataagatgaaggtaggagatttagtttggtttaacagagctagtcatgtagggatatattgtggtgagggcaagatggtctcttgtaatggaaaaggtaacatggatgagtccccaaaaacaggtattgttattgtcgacatgtctaaaggttattggtggaacgcttttgacggaaatgtacgtagatataaataaccctattttttagggttattttttttgtataggtagtttttagttattgtgctataatagataatgaggacacatgatgagaggatgaataaattggtaaaacgtagatttcaagcaggtctaggctcagaaattaaaagagtatataaagaaggacaacaaattaacacgctactattagcacaagtaattcaagtaaactataaatataatacagtagacctactagctttacagcacaaagaagtatttcaaaattcttatgcaaatgagggtcgtttctctgcaagacttcctatggaatttggcggtagaaatatcgttggacagccttatgggcaggttaacccgatagcagtaggaacagtagtattagttggttttattaattccgataaagacatgcctattgtaattagtgtttataataataacgatgtaagcaaacagctttcaagaacacaattttcaaattcagaccctaaagatttagagttaattggggatatgcaccaaaaatttagtttgtacccttcattgacatatgatagcgttgatggagaaggaggacgtgtcgttactttttctggtaaatcatttattgcttttgatacaaaagaagtagctaactcctctacaactgatgcaggttatggtactaaatatgaggacttagagacatcatactataataatggtgacctaatagagcctatgaaaggtagagcaccaaatgtactgtttaagcatcaaggggtacttgacgatgatggcaaaccagatttgcacgatttgctaattcatattaacccagatggtacttatagaacttctatgatgaacaaagaagaggattggcgcacactatttgaaatgacaccagatggcagagttaaattaagaaaacaagactctattaatattgatggtggtatagaaataagtgagctaggaatcaataatgaggggttcgtttatttacgtaatggggacatggatttagaagtacgaaaagacggtatctattcacaagggaaactgtttacagccgatgtagacctatccgatgtatatgacaaactaaatgggttgtctatacagattaaggaaacaaatggtcaattagagattatagctaatggtgtagaagaacaaaatggaaaaatatcagaactttctacagaaataacaattgtagcaggtaaagttgaatcaaaagtaacaaagacagaagttcaggatatgattgacagttcttttgtagatatgtctgatgcgattaaaaaagcacaagaagatgctgacaaagcaaataaagtgattgcagatatgtctagtgataacaggttgactccaagtgaaaaaatagatttattaaaagaatgggatattataaaaaatgaatatccaagctatcttgaacaagcagagacctacgaggttgacagtaaagactacactgctaagtacaattcattagagctatttgttacccctatattggctgatatggaatcaactagctcggtagacggagcaacacttcgcaaaacgtttaattcttactatacagcaagaatagctttactaaactctattagtaaaaaactaaaagacggtatcacagaggctatgaaaaaagcatcccaagcatcactagatgcaacacaagcaatggcagatgcctcacaagctaagattgatgcagataatgctaacaaacttatatctgatatagcaagtgataacaagctaacaccttctgaaaaataccaacttaaaaaggaatgggatgtaattgttaaggaataccctacaacaattgcacaagcagagaagtacgcagtagacacagcagagtatacagctaaatataaagccctagagctgtttgtagagcctttgtttaaagacatggatgaaactagtatagtagacggagaacgccttagagcgacattctcggactattacgcaagtaagattgctttactaaaagaagtaacggactcagctaaaacagagctagatgcctatggtaataaaatatctgtaatggaaacaaacattactcaaacatcagaagctattactttactagctactagagtacaaactgtagaagacggtgtacaatcgaataaggcacaaatcgaaatacaagctgaacaaattagtcaaaaagtaactgctagtgaggttaaaggaattgtagacgattctattaacaatctaacattaggtggaactaacttatttgttataaagacacagacagcaggtttactaaacgagaatgatggaactgtaggtactgcagtagacaactcagtagtgtcagactacattaaagttaatcaaaaaacaccatatattgctacactttacggtaacactggcacaaacatgattataacagactggtacgataaaaatagaacatttatttctggggaagctgtggcagactctggggattttagtaaaaagtatgtgtcacccgagaacgcagtttatgctagagtaagttataagaaagcaaactctgtgaatatcaaattcgaggcaggtacaaaggctactgattacagcccttcatgggaagacataaaaggtgaccaaactgctttagaggaatacattaaaaaagtagaagaacaagccaagaaagctcaacaagatgctgaaaatgctaaaaatgatgctgaaaatgcaaataacgcaatagctgacatgtcgaatgacaatatgttagcaccgaatgagaaaaaacaaatactcttacaatgggaacagattaaaacagagtatccaataaacttagaccaagcaactaaatttggggtgtcttctcaacagtatacaacagcatataacgcactagacgagtacttaaaaccaatactagctgatatgacaacaacttctgtagtagttggttctactttaagaaatacgtttaacaattactatgacaaaagaactactttgctaaacagaatatctgacgtagcaaaaaatgtagcagataaggcgcaagaaactgcagatactatcaatgataatttacaaaatattggtgggtacaactatgtagggttctcttccggagacaatatgttgcctagactgatgattaaaaacgttggttactacacattaggttcgtcaaccacagagttcattgacagcatggtagctgtaaaaggtgatgcaacgacccaacctttcgattatactgtaggtacttctgataaagaaattgctggtggcggtttagctgattaccgtatgaaagaagtaaaagaaggtcagtggctaacagcttctgcaaatgtgcaggtaataggtggtggctccgctagattagctatctacactttagaaggggataactgggtaggctctaatagtacacctatacaagtaagtgatggtttgaaacgtgttgtggctcaaagaaaagtaacaggcttaacaaaaggtgtgttaatacgtattgagtcagcagacactaatgttaaagagtttcgatttggtaatgttcaactagaagttggtattatcccaactccttggaaaaagtctgatatagatattcaagaggacataaacaatgttgttcagaatatcaaaacatacactgcttgggctaacgatttacagggtcttgattttacaagagaaaaggttgaaggaaaaacttacatgtatgtaggtacctctatgaaagatagtgataactattcagattatacatggaggctaactgatgaacatatagaaggtcagattaatggtaaggaaggcgcatggatttattctccaacagctcctactaacccatcgcaagggcttatatgggtagacttgtcaaaagtacctaaccaacctaagcgttgggtagactcagaaactgggtgggttgcattaacaccagaaggggttaaagatttaccttggggtgaagacggcacaaacttagctgactgggtagcacaagcagagcagagaatatcttctgatagcattataaatactgtactaggttctgaggattttactagtgtgttcgatacaaaagctaacactactgacctagacaacttagctacctatgaagatttagactcaataaaagaggactataaccgactaatcaaagaaggtataaacggtattgattttaccccttatgtaactaactccgaactacaacagcttaaagacagctttaacttctctgttcaacaagccggaggggttaacatgcttaaaaactctttaggattctctgggttagacttctgggatggtacagtagggaagaacttattacctaactctacttggaatttaggtttcggtagatggggtggcgcttcaatcgctagttttgaaatattaccaccagaagacgacaagcctacaagtcatatactgggttcaataggttctcgttcttctactaaagaaataggtaatagaccccacccattaaaagttaactctggtgaaacgtatacaataagctttgattataaagaagaggcattggcttatgataaggacagacctatccttgttgttagaaactaccctgataaggacacagaccaatggatggagtactcaatagaaggttgggcagtaatggctaacggaagcactactgacttaactgtttggagacgttttacaaaaacatttacaataggtactagtggctacttagatattttacctaaaactatagtagaatcatggacacacaggtctttttggagagagctaaaaatagaggaagggtcacaagctactacttgggtacctaacaaggaagacggggcgtttaccggtggtattgttgaaactacccaaacagaagaactagctaaccttgggttcggttcgggatttgttagttctaaaagacctagctcttcactaacacaatctgtagaactacctgaaataggcgctaaccttgagtattcactatctttttatatgaaggtaactacagacaatcctgtagccgactttaaatgcggtattcgggtttatgagggagatactctaacttatacattaggcatagaagatgcaacacagccaataccactagggttccaacaatacaagcttgtgttcactcccacaagtacctctactaaaatagaaatgtttgtagagaatggacaagaggcatctgttattatatcaggtattatgtataatatcgggaatatacctcttaaatggcaaccatatccaagtgagatatacaatacgaatgttaagattgatattaatggggtaactgttaaaaacaatcaaacagatgggtacacaatgattaccccccaagagttctcaggatattctcgtattgatggtaacatagaacgtattttcactttaaatgggcaggtaacagaagttaaaatgctaaaggctgaaaaacgtataactatggaaccagtatctgtgtttgctatgaatacagtaacagatacaaaaagaattagaggttgggcatttgtaccatcatttgaataaataattcaactttttaaccgaaaacttcacttacaagtcgttttcggttaatttgtgttatactatatagagaaggacacgaaaggacgatgagactatatggctttaaacggaacaaagtatacagcctttgcccgacatagattagttttagagtggcgtgcaaatcaaaacattgcagggaactactcaacaatcagcgtatggctatacctacaatctatggataaatggggtagacttgatgctcccgctatcggtgatgccaaagttaccgtagacggaactacacagacagaaaaagcttcctctatgttaaatgctttccaaaagaaactattactagctaaagagtggagagttaatcataataatgacggttccaaaagaataactattggaggtagctactttgtaaacgttacttttactgataacggtgtaccaacatattatggtaccataactatacctaatttttcagtagacctaaatagaatacctagaagaagttcattaaaccctgtccctacattaaatttaccggggaacttaccgataacaataaatagacagagctccacattcaaacataatctaactgcttgggtggctaacagagataaccccacattaaacaatgatgaccattggacgtacttgacaaaccttaatgatgtaggcactagtggagcgtttagttttacagtagcaaataacaaaactatttttactgcattaaacaatagaactagttggcaaggcaaggttaaactctggactatagggttagatgatgtagttagtcaggaaagaacatacaagattgtccccccaatgaatgcacaagcatcgggaggtaagataaccttaaatgtgggagagaaaatcaatgtatcactaagtaactatcggtctgatgcaaactttacttatgatggggtatttaacattagtgggctcaacatacctattgctacaaattcagcagggaacacaatgtcgtatacactaactcaaacagatgtagacaatatattgaagaaaataccaaatgcggattcctcgtggggtcaagtaactgtaacaagtaagtatagtggagtacaatacaggactccatggacaggacagagaatagatataactatacctaaaaacaagtatgtaccaagcattaatggtacccctacttatgaagatacaagtaatgtctctgtcgggcttacaggtaacaatcaggtagcccttcaaggtaagtctaatatcaaagtgactatccctgctaactttgcaacggctaatggttactctactttgaaaacaattgatgtgtctttaggtggtacatcaaaaacaatcaactattcaaatgcagaaacagttgtagaattaggagcacctgctaaccatacgtcagatacattaatagtcacagtaactgacagtcgtgggtttaagtctaactggacaaaacatgtagacatttatccctatgaaaatccaaatatggactttacagtcgcacgtagaaataactttgagacaactacagatattaatgtcaatagtacatggtctcctatcactataggtggtgtaaacaaaaatgctatccaatcagtaacctacgcaacaaaagtagcaggtgttggtacttatggagcagaaactgctttaaattttacagctaatggtagtatggtaacagtaaaaaatacaccaatagaattagataataccaatatatacgaagttaggttgagtgtaactgataagtttagtacgtttactagaacagctactgttaaaccgggtaaccctatcatgtttattgatgccgataatcgaagtctgtttttaggtaatgcctttgttgacaataacaataatgagctaagaggcttattagagatagaaagagataagtggcaggagaatggtttagtaggaatatccttaaacaacagtgatatatcagcagtcaatggcatatggttctcgacagatacatcaaataacggaggtgaaggagttcactttattaaatcaggtaaaccaagaaactccttaaagtgggaggactatgactacgtttatatgagggacaatggattctatgttaacaatgactctaatcctatatttgaagtttctgacactggtacgatgacgtttcctactaaacagctttggaaaggggctgcctatttaaacgaaaaacaagaagttttacctagcaaaaaattaacagagtgccgaaacggatgggttttgaccttctccgcatatgagtcaggtgcagggcaaccttgggatataactcaggtatttattcacaagtctgtactagaccagtttaacacaagagggtttagggctataataggtcatggaactacgataacatttaaatatatgtatataactgacggtcgtattggtggtaatgttaataatgggacaggagttaacaatggcattgttataagggaggtatcagaatggtagaagaaactcaaaaaatatttgtaacactagatgataaagattttgttagtaactggggaacgtcactcaatagtgatgaacctgtctatgaagtagatttgccaatggattctccattcttttcacattactattcaaattgttttcagtatgtagatggagagctagtcctaagtgaagaaaagttattaaaagtagagttactagcagtagccagtaagtttaaaagggactgtgaagagacctacatattgcaaaaagttccttatacaatatcaggcactacctacttatttgatgttattagcgatgatgagtttattaataaaataactctactagacaataaaattcaagattatgttggaataactgcttatgctacatcagatggttctcaattgatacttaaatttgataagtcccaatatactactatgactagatatattaaaaaagtagttgagtctagggaaaataaattaaataataaattacttcctatgattgaaaatgctaagtctgtagaagaagccaaagaaatttcttggagttctgtacctgatgagttgctaccagagcaagagagtaatgaacctcaagatgagcaaagtatagatagtttaattaaagaaaataaagaattaagacaaaaagtagaatttaatgaactagctttaatggatgcaataaacatgttttctgaaatgaacaagtaagttattattaactaaaggaggtaatatttctatgtacccatacttatcaatgttatatgcatcttatgtaatcaaagaccctgagaactatcctttagagaaggttccggcactaattagagaagatgtggagaaaatcgtggaagagatggcaaaaaagaacgaaaaacaaggatagttaatttagtaattggagtaacaataggtttaatcatagggctactaatttaaactaatataaatgagggtagtttgtgctaccctcttttttatactatattgtactatattaaggaacgaaaggagcggttactatgggacaatcagatggtatgggcggtacattaaaacgtattgcgattcaagtaggtaacgacccaaataaaggttggtatcgatttcaagtaaacccaactcaatataaatataataagccacatcgtgttactatatttaaaactaaatcaaacattataacagaagactttggtaaagacatagaaactatccaattttctggtacaacaggattcagggtagacagcagaggtaaaaacggggcggacagactaaaagaattagaagagataatagataattatgcaaaacagggtggtaatgggaataggtctagcgtagagatgaaattttataatttcacagacgataaatattttgttgttcatttagcaccagaagggctatccattgaacgttctgcagaacagccattattatttaattacaccttaagtttagtcgtgttaagagaggcaggacagccctctgagagagctcaagtaagccctcaaataggtaatgtaagtcctagcattggacggacatacaatgcacaacaggacactagaacacctgctcaaatacttcatgatgaatataggagaagtgttatgccaaatacagcagtaaatcctgcagtaacatcaggagcctacaactatggtgtaaatgagttaaaaaaaataatcggatatggagggtagctcatggaaaaagtagaacaatccgcagatttgctaagattttttagatatttaaatgtcgatattaacggtgaagttgtagccaatgttattgacgaccaaccaaactttatatcaaggttctacacccctcatacacgagttaataaaatatctagtacactattagatattgtgcgagataacgatataggggaaacaaataaggctttgtctaaagactccttaacctacaaatttttaaaaagtgggcttaagctttcatctccacgtatttacgaactagcacaaattgtagtattagaatcctttgctcttatatatgctatcgaagaagaaccagagatgtttaaaatgattaacgaatcagatgtaaagcagactagagaaaatgttaaatacttaattgactgtttagggggagcaaaagactatacagacatagtgatggacttacaatctatggatgtcgctctaggatatattcaggagcaagttcctttaatacaaggaggtttaccagtaaatggcacgatataaaaagcatttaattgtatatggagatacaatgcaatccatagcacaaaaagaaacaggctctgtagataattgggtaaaaattgcggagtacaacgacttagtttacccttacatagtagatactatgcaagaaaaaatgagcaacttagaacatctagctacacttggagacaccctttttatacctgatgaaggtaacttattggacattaacacaagctcattaaaccaaagagatatggatttcttattaggcttagctttaggtaaagatttggatatgacaagtgatacagattactatgagaatcatggaacaagtgatgaagtgtttgcaataacacataatgggcatggtgacttgaagatagctagtggggcagacaatattaagcaagccactatatcaagattgatgacagctaagggttctcttatgttgcacccagagtatggtagtgacttgcacttaatgttcggtaaaacaacaattgaacaaatgaagataattagtatagaagtatgcgatacagtacttaaagatacacgagtagcagaatgcgttctagtgaaccattatattgaagaagaccgatatgttggtaactatagagcaaccttacagtctactagagagcaatttgagtttgttgttcaaaacgataactcaggggctctaattattgtatagaaaggataaggtttaatgagactaaagaaaatttcagagatactaggtagactaattgatgtaactatgataaacacacatgagataaacgatttctcagttggttctactattcgttctatttatgaagctgtttctatggagttagaacagtactatattttaggtagagagaatattttatggggaattgaacaaggagtcctaaatgcttttgactttaggaaaagagaagcaaaaagagcgtatggtatggtaacactagagttccatacggttactcagacccctgtgtatgtaccaacagggacaacgttcgactctagcttgtctggtgcccctagcacgttaacattccaaacgatgcaagactacataattccagaaggtgttataacagcaaaggtagaagtttattgtacaactgtaggtacaaaagggaacatacctaaaggaagaatcaatcgggtaattaacaatatatcaaacttaaaaaccgtgtataatgagtttgattttttaacaggtactgatgaggaaagtatagaatccgttaaaaaaagatttcatgcatttgtggaatcacgtggtagagcaacgataaaagccttagactacggtacacgtcaagtagaggaagttgcaggagtttatatcaaagaagaagtaggttacgttagaatatacgcacatgatttaaacggtgatttaaaacaagaaacactagataaaataaaagtagctattgaggactacagacctgcaggcattaaactggatgtattccctgtaataaaatccaatgtacaagtgagtgcaactgttactataagtgacaaatcgagaataaatagtaaattagaagaaagagtggagcttacaataagaaactacttaaatagtcaagttgtttcacaaccattaatcttagctgacctaattcaggttataatgaatattgacgatgttttaatctatgactgtaaaattaacaacatggaagggaacatggctgttagggacgaagagataattcgtgcaggagaggttattgtagaactgatataaattaggaggaatataatgtgagtaacttttataaaaatatccaccctctgttgagacgtggtaagaaacctaacaagtatgatgatactaactttgcagtgcttaatgcgttgaactatgaattaactcaggcagagcaggagaccattgctagtaagattcattcttcattagaaacagctacaggtgagtacctagatacttggggggactggtttggtgtatatcgtaaagatgattggaatgacgaatattataggaaaagaattataagagaacttttactaaaaagagccacaattcctgctatcattgatgcgttattggatttccttaacgacaatgatgcagtcatccaaatatatgaaccttggagaaacattttctatacaaataagtcaaaattaaacggtgacgaccatttaatgggttactactaccgttttgcaattatcgatatttcaattgatagaccgtttcctcctgaaattgtagagattattaaggctttcaaacctgcgggagttctattttatctaaggctagacacaagcttaaataagaataaaacaactgtagaaagcccatatgtatacctagacgtgacgaataagacagaattagagttccttaacggtttatactatgacctacgaggtaacattaacctgtctgaccaacgtacacaagtagtagagagtaatatcttccatacgaataactctatgctaaacggggaagatgtgcttgcaggggcatttgaccatggaagaggttacatccacttagcaagtacgacattgcttgagtacacaccaaaacctactgactctatgagtgacttaaaaacagctctaggagagtcaggtgctgacatgtataatcaaacaaaagaaaaggatggaagaacagcttatattcaagtacctgcaacaaagaatatccacactttatattcaaacagtacagactttagtgattacgattactcgggaaaccctaacgtgattgtaacaaatgctaatacgttcaaatcaggaactggcggaactcttacctataacagcggggagtacactgttttgatggatgggtcagatagattaaataaatttaataccgatggggagaatagtgtatacctagaagataaagcgacctatacaatttcttgtgagatgtatatcggttctgactatactgggaatgccgaccaagtatttgctaactatgcatatcttgatggaggttacactttactgcaaacaacaagacttcctgcgaatgctcctagggatacttggataacagtaaaaggaacgtctaccatgaattaccaagggatggcacctaaagtattatacttgagttggcaaacagttgcaagtgatactaacccaaccggtacgcttaagatgagaaatataaaaattgaacgtggggaaactaatactccgtatcaacctaatttattaggggcaccttggtatttaggtaaatttccattaggaaaaaaccttgcagaccctacagttaagttcccaataaacacgagtgaatataagctatatcaaggtgatatgtcagagccgtttagagttggggaaacgtatacagttactattgaaggtataaaacctactaaaaataaatttggtgtgtataatgcaggcacagttttattaggatttttacatcctgtagagggtttacctaatacatggactgggacatttaaagtacctgcagtaaacgcagaataccctaatagactgcaactatatcaattatcaaacgataatgactatggtgctgttaaaattgactggcttaagattgaaaaaggaggtactagaactcctaacattgactcctacaactatgtaggcactctggtagaagatacagaaacctctacagtagacccaactaagtacacatggacagtatatggaagtataacaaataaaaaagcatatatagtattcgatgttaaaacttttatcgaagaaaattatgctatggaatttgaaaagcttattgctgacctaggagaagaccaagcattaaatactgtgtttgaaaactttaacatctctacagcacttaaggctctagtaagtccaagttcaccaattagtttctcggttgaactatacgatttttctacgagtgcatggcacaagttaaacacggatagtttagacttacgtatgcgtacattcaacttagtagcaaaccgtatcacagactatctaaatgattacaagctattatttgttcgttacgtgttcgataacgaaacagataaagatgcaacggttgaactagacatgttaaatgtactgttcaaataccgtttaggtgaagggtacagtataggactacaatcatctgtggaatcactaacggaactcgttcctatagaagggtaatagcaaataatatgttataatataaatagggcacctagttgtgtcctattttttaataaacatgctatattaacaattgaatgataaagaaaagaggtaaataatgtggctattgcaactaacaattcacgagtgtatgcctcactccaattaaaaaataaacaagacagtatgtacctagcaattggtaaaaccactccttggactaatgaagatgcccctcctgcaccagaccctaatacgactactctaacagaggttattggttataaaaaggtagcaagagtatctttatgtagagaatatctaccaagtgatgattctaaataccctgtggtgtcctatggttcaagaaaatttacgctaattccagatgaggacggctataaagagcaagcatggatggtgtatgtagaagcagaaattacgggagatgaactaccaacaggaacatttagacaagtaggcattcatactgacttagtgtctaaggcaagttcagaaaagaaagctttgttacctacagatgtaacagatgcaggcattttgcaattttttgaaaacagacagcaacaaaatagaacaagtgatgtaattttaaaagagaagtttattattacaatggaaaataagaagtcagttaaacaataggaagggtgacatagatggctaaaaatattacaaatgatgatttaggtaaagagccttataacaatagatattaccaaggcaaacgattttcaggtttactatttaaaccagataagccgttacaacaagccgagttaaacgagttacagtcaattattcaaggagatttaggtaatgtggctgaatccatatttagtgacggtgacatccagactggtatggaatatgtgctacaagataagaagcttactattaaaaaaggtaaagtattcttaggcggtaaaatgcgtaactttgacgaacagagtatcgatattaccggagagggtacggagtatgtaggtgttaaacttgtacaaaaagttattacagcagaagacgacccatcactgttagaccaaacaagtggtgttcctagccatttctcagaaggggctgaccgattagacgaagatgtagtactagcagttaacgatgattctgcatcaaacatttaccactttgttaacggtgagttatacattaacccagatactcctgagatggataagattaataaaatactagcagaaagaacttatgatgaatctggttcatatcgtgttcgtggttttgatatgtatacagaagtccacccaacagaccctaacaataaaattcagttagttgtcgattcaggtcgggcatatgttttaggttttaaagtagataaacctacaactactcgtattgatattgaaaagtcaagagagctagaaacaatcaataacgaaggtttctactatagcaatgcaactcgtaaaaacaaattaggtaattccccagtatcttctgtagaccgtgtaactgcacaagttgaagttgccaaagaacaggtttctcgtggggtcgtaggtggaggtaccgattatcttaaaaacacctctgtaacaaaagttatccgtgtatggactgagggttcaggagcacaggagtacaaacaaggtgaggacttccaattagtaaatggtcaagcaatatcttgggcacctacagggcaagaacctcctgcagggggaacctacttcgttcaatatgtttataataaaacaatgattgaaaatacagattacaaagttgtaattactggtgaaggcgatgctagggaatggtacattgactttaacgagatgacaggttctaaaccagtcgatgaatcacttgttaacgtagactataaatacttcttagctcgtaaagacctaattgtactagaccataatggaaactttactgttcataaaggacaacctaacgctttaagactagtagaggcacctaaccatgtagacccattagttttagctattggtacagtagtagtttacccagactcaaatactgctgatgctaaacaatggacaatcacacgtctaacaatggaagagctacagaagttatctgttcgtgtggaaaacatggagtataaccaagcagtattctacttagaccaaccggcaatggcaggagaaaaccctatctatctacgtggagtattctcggatgcgtttatctcactagataaatatgacgttagtcacccagatgccacaattgcttttgactttgacacagcagaaataacattgccttatgcagaaattaataaaacagttccaacaatcatcgaaggttctagcgaagcacatgtgtggggtagactagtaacagcaccgtttaccgaagaagtgggtattagacaaccatttgctacggaagcaatgaacgttaacccatacaacacctttaacaaacagggtgccttaaagctaaacccttctgcagataactggattgaagatgaacgtatcacagttaccaaagaagaaacatctactatgactgttcgtcaatggtggagacatggtggagcatcttggacaaacgatgagatgaacatggtatccaacatcacgctcgaccccggacaatcgtggggaggtgcctctggtacagaagaccaacgtaaacaagggctatccggttctactttaaccagtggtggtcagcaaaccaaagaatcaatgattgagtttatgagacaaattgatgttgaggtttacgcagagaacttgcaacctaatgctaataacctatacgtaacatttgacggcttgagagtacctgttaccccatcttctggttaccgtaaaggtgccacagaaggtactggtatggcaaatgcagacggaacatttaaaggggtatttaaaatacctgcaggagttcgttgtggtactcgtgaggtatctgttagaaacgatacgaacttagcaagtactacgttcactgcacaaggtacgttaaaaacaaccgaggatattatcataaaaacacatgttactattaacttggttgacccactggcacaatcattcagttttaacactaacagagttgcaacaagctttgacgtattctttgcatctaaggataacagtacaaatattatttgtcaagtacgtggaatatcagaaggtgggcaacctaacaaaactgtgtatgctgaaagagtgttaaaaccttctgaaataaaagtatcagatgatgcaagtgttcctacgaaaatcagctttgatgacccactaatgtgtaaagcaggtcaagaatactgtttagtattcattactgactctgataaatacacaatgtggattgcaactatgggtcaaaatagagtagacgaaccaacacaaacagtaacatcaaatccttacttggaaggtgtcctatatagttcatctaacgcaagtgcatggtctattcaccaactgtctgatttgaagttcactgtatacacggctaaatttaacgaagaagcggtacttgagttcgatgttatgaagaacgttaatgtagaccgcatagtgttaatgtctacctacctaactcctgcaaacactggttgtagatgggatatgaaactagtccttgataatgaacctgcaggtacaacagtagatgacaaaccttggttacctattgctaactacgtagacttagatgttaaccagttagctcgtgaggctaagcttagagcaacatttaaagctaaccaatacatctcaccaatgctatccttagacgacattatgttcgcagggtttttaacagcattgaaaggtagctatgtatctcgtacaatagacttaacagaggctccttacaacacggttaaaatgtcatatgaacaatttacacctgccggaactgttgtgactgctaaatacagtacagacgaaggtaaaacatggaagacatttacagtacagcctacaacaacacaacgtacacaagactttgttcgtgtagactatgttgaaaagattaatacgggtgggacatttaagtccattaaattccgtcttgatatgacgacccaaaactccttcctccgtccgagggtgcgccgtctaatgtgtaacatgacagataaatagacctaaactgtaaagtttaatgacattataacacacctttaatatgattgtaacctcctacgtgtataatatatttatacatttaggaggttttcatatgggaaaatttaaagatttaactggacaaacttttggaaagtggactgttgttgatatagacgagactaaagacagaatccactggtggtgtgagtgtgaatgcggaaaagaacagagcatacgagcatcttctctgacctcgggtaactccaaaggatgtcgagagtgtactagaaataatctgatgggtaagacttttggtaggttggcagttattaaagattcaggtgaacgagcaaagaacgggaatattctttgggaatgtgtgtgtgattgtgggaaaaaacgtttagtgttaggggctaatttactaaatggacaaacaaaaagttgtgggtgctactctacagatatacttaaaaaagtgtctactaagcatggactttctaaagtaaacgggaagaaaacaaaactttttatgacatgggatgcgatgagacagcgttgcaccaatagcaatcatgctagttacaaagattatggtggtcgaggtatcactgtatgtccggaatggctcaataacttcaaatctttttatgactggtctatggataatggattttctaatgacttgtctattgatagaattgacaatgacaaaggttactcaccagataactgtcgatgggtagatgctaaaacgcagattcgcaatagaagaaatacagttacttacaactggaaaggttcagaatacaccttagctgaactaggtgaactaacaggtattaacaagatgacaataaaatctcggttgaacagaggttgttccctcgaagaagctctttcacaaaatgtagatacctctgtgttacttatgacctataaaggggaaactaagcctatcaaacaatggtgtaaagaactgggattgaattatgcaactgtacgtaacagatattataagggttggactgatgaagaagccttaactggtaaacgcataaaatagcaacagaataagtataatagactctatatgttataatagacatatagagtctatttttttttgtttaggaggaataaaattgccagaaacacatagacaaacaagctcaggtgcacttatatttaaaccaactatagctgaacaagagcataaaaatgctatggaatctataaaacaagagagaacagagctagagaaagaactagctaatgttaaagctatcaaagatgagttgtcaaaagagctagcagatattaaacaactgaaagatgaattatcaaaatagtttctaaattgtcctatttaggatttctggttcccttatattattaactaatatatttaaataactctatataaaatatataatatataaataatatataataagactacgaaaaatataaaataggacaaatcaactctgtatacaccttgacaattacctactatgtgatataatgaatatattgattatactaaggtgggtatgtcaaggagcatgtatactaatctaacttaaaggagatttattaataaatgagactagtagtagatattatgcatactcagataaggtacgaagattcggaaaattatcttagaccagaaatccataaggtaatgcattcagaattaggtgttaaagcagatggataccaattcagccctgcgtataaagcgggttactgggatggtattattgatttttttgataaagaaaatgatacgttccccacagggttactacctcatgtagaaacaatactagggaaccttcaatcaactttatcaaagtcaggttacatttttcagtttgagataattgatgatagacctgatgagttcatgtcagtcgaggacatggataaggagatagtgcttaatggggataataatgacaagataacattaagggactatcaatatgaatctgtggagcaagttattaagaacagaataggtattgtaaacgttagtactggtggaggtaaaacagaaatagcatcagggcttatacaacaaataaccccttacctagagtcaggagaacgtattgcattttttacgaatagttcttctattttttcacagtcaattgaccgtattgagaaaagacttgggataaaggtaggtgcttttggtgcaggtaagaaagatattcagcaagtcacttttgtaatgatacctacgattgtatctgcaatatccgcagacccagaggctaaacttaagctgactgctaaagaaagaatgtacaagaaaattgctaaggatatagctccaaaatttgaaagagggtttaaccaaaggagtttgcttgaaggatacctaaataactttcaagttaagacaaaagcagacctgcagttgaaacatgaactagaagaaattttttattcatgtggtacgaacaaacaggttattatgaaaatgaaagggtatcaagcagaataccaaaagattgttgaaaagaaaaatggtaaagttcttaagaagtacaacgaggctatggagtttttagattccatatctgtaatgattgtggatgaggctcatcatacaagttcagatacttggtacaaagtgttaacatcttgcaataatgcccagtatagaatggcacttactggctcgattgaccgtacaaatcatgtgctttggcaaagacttcaagctatctttggggagattacaactaaggtatctaataatacgcttattgaattaggtcactcagctaaacctaaaataacaatattcccaattatagcccctgtagatattcaaactactacatatatggatgcttatcaaaaaggtatagtagataatgaatatagaaattctcttattgcaaagttgactaagaagatgtatgataaaggtaatgggattttaattataattaatcgcatagagcacggagaggctattagtgacttactaaaagaagagggagtagctcactactttattaatgggcaacttgaaaatgatttaagggatgaaaaaattcaggacatgcgtgatggagcacttaaagtaatgatttcttctacgattatagatgaaggtgtcgacatttcagggattgacacattaattcttggtgcaggaggtaagtccttaagacagacactacaacgtgttggtcggggtttacgtaagaaaaaaacaggagaaaacaaagtagaggtattcgatttttatgatttaacaaacaaacatttgaaaaaacattcagagcagagaagaaaaatatatgaagatgaacaatttgaaattgttgatattcctattcctaaataactataataaagaaagggtggcatacaattgcaaagtccatgcctaaatattgaattaaaagaaaaatttaaattaaacaaaggtataacagactttttagagagagttgcagataaatctcagagatggggtgaaacagtagcctcccctatccgtaaaacggatatggcaaaagagactggaaaaaaccctagaacaattacaagatatattaatcaattagaggaactaggtttaataaaaaccgaaacaaaaagaggaatgaatggagggactttagtcgtgtttaacacagatatgcttaattttgagccaaaggaaaaccctatcacgtctgatactaaacaagcaaaggagattagagaacaagtcttccctaaagccccaaccaaagtaccgaaacgcagatatagaacaaaagcggagatagctgaggcacgtatacttagtgaaaaacttaaaaaacgtgaagacattttaaatgataaaattgagtttaacgttgttactagaagttttttcgatagttttgacgaaccagaggtgtactttaaaggctatttaatttcaagaatgtataatgcttatgtgacaatcattccttatgaaaaatataatagactgaaaaatttagatgagaaaaaggctaaacaacaactacgagcatacgaaagctcttacaattacgatgtgttgcctagaagatttgttgggacacctcagtacaaaaaatttgtagagctagctaaatattgtgaagagaacaatatcaatcctttagtttatttaacagtgcaatttgatagaacagagtttttgatttctgtaggtaaagcacgagtaggggctacaccctatgtaaatactttgttatgtgcagaggctaaagaggcttacacaaatagaaaactgttctacagaatgttacagaaccaatatggattgtatacgtctatcaattcagaagctacttattatggtgcaacttacccaattatttcagggctattgaatgcttacaatatgccacagaaagacttgtcacagttagacactgctatttgtgacttagaatataaaaaagatattgacaaaaaagcaggtacgttgtactcttattatacagcaacacttaaatcgttagatgaatctaacgtatctagtgaagctaaagaaagtattgctaacttcttgaaagaacaagttgcaaacttttctagtaaacgtggactaacttcaacacagtatgccttagcattccctattcagataaactctgcacgcagtttattaatgaatgaggaagacgaagaactactttatttattgttaggtaaccagtcacgattatctaatgtaacaaatgatgaagctgaaatgtttattaaacaaggtagaaaattaagtatgtcttggtggggctcacagaacttctcaagaacaatgttcatgttagcggactactatgggtttaaaacaaatatatctaagttaggtatgtacattaaagaatttggtgaggagaaaattcctttagattctgtaggtatgttagatgtaaatagaatctatgatgtcttaatgactgaacaagagattttagagattgacaaaagtaactgggagaaccaaaaagatatgcgtgacgacaaataagaaatataaatgggagagggacggatagtaagatgagtcaaattcaaaaacaagttatttacagagcattaagtgagccattctttgcaaaggaaattttaagtaaaattccaatggatgagtttaaagattctggatatgagatgattgtttctacaatcaacttatattacagaacacatgatgagagcttagaggaacagagtttattaacactagtagaagataagatgttaaaacaaaacaaaagtttggaagctcaaaacaaagtctttgaggtagttagcgacttatacgaactagagaacgaagatgtagactcagaagttatcagtgagaacattcagaactacgttcgtaaggtactaacacgagaagcaatcatgaaatctgtaacaaatgaaggcacactaggctctgatagtaatattcaacagctaatggatgacttgagagacattcttactattgagacagcaggcaataattcagaattgctagacttcttcgatgacgtagataaaaagatggagttacttgcaaacttacaacaaaacaaatacccaactggtttcacagctattgatgctatttccgatggtgggctagctcgtggagaagtcgggatggttgttgcgcctactggtggtggtaaaactacttgggcagttaaccaagctagaaactatgttgtacgtggtttaaatgttctttatgttcctttagaggaaaaagtagaccgtatgattgttcgttttgaacaattattatcacaacaaagtaagaagaacatcttagttgatggtgaattgaataaagacttgtatacccaaatccaacaagcgtatggagcgggtaaagaacagatgaattggggtaacctttggattcgtaaatataaaccacaagagctaacacctagcggtttatctcagttaatctccgatgtaatgattcgtaaaggacagcaaattgatgttgtcattattgactacccagatttaatgaaaaatcctcatgcaagtggaagtaatggtgaatcagatgcaggaggtaaactatatgaagatattcgtgcgattgcacaagagtatgattttgtttgttggacgttatctcagttgaaccgagcaagctatggtcaagatattaaaaatgcaggagctatcgaaggttctaaacgtaaaatgaacgcagtagaacttatttttacattaaaccaaacatcagaggagtttagtaacggatatttgagagcttacgtagataagttacgtaataatagtgggattgcctatgataaaatgttgtattttaaagtactcccagaaactatgactattagagatgaaacaccagaagaacgagcagaacatgaagcactgttagcagataatgcgatgaatagagcaagtagccactctgatgagaataactacacagcaaacgatgttaataaaaagataagtaatttgaataataccctttcaggaggttggaattaatgaaacatattattaatttttcagattttcatatgcacttttttaaagatttttcaaaaccagacccagagtacggaactgatagagcaaaagagcaaattactatattagacaacttgatgaactatgcacgaaacaaaaatggggatgttttatttaatggagacatgttccataaacgagtatctattgatgttagaatattcaatatgttatttcaagtaattagtagctaccctgatgttgatgttatcatggtcagtggtaatcatgataaggtaactaactctctatactcagatagtgctttagcaccatttagtgctttaccaaatgttacagtttgttctacgttaaacaagattgttaaagatgattatacgttgtatgctgttagttatggggaagaggtcgaagagatgaaagcttggataaaagaacaagctgacaatttagaccatgaaacagttaatattctaagtgcacacattggtgtagatggttcatctactggaaagtattctcatacacttggtggtgcttttaaagtagctgatttataccctgacaagtttgacatagttacattgggtcactatcataaacgacaatttttaggaaacctatctaacgtgttttatgtgggcaataccctacagacttcttttgcggacgaaggtcaagaaaaaggtttttatgatattactatagagggtaagaagtgggaacaaaaatttattaaaactgactatactccgtttgaaacagtaacagccgatagcccatcaacaacaggttctatggagaaatcttatatccagtttattggtaatgtggacgaggttgaggctgtaaagagaataaaagaagagaataacttaagcaatattagaataaaagttcagaaggactaccatgttgagccacgtataaacataacagcaggttcgacacctaatgaagttgtcaatgcatttattagtaaaaagtaccctaacgcaaaaataattaaagaaaaagctctcgactgtttgagagaagcaatggaagtataataattgtttagcctagatatatctaggcttttttgcgttgtactattgactttattagtattttgaagtataatatgtttattgaaataattaattaatattttgggaggaaaagatgttaaagtttaaacgagttagcgcagagaactatatgtccattggctctgtatctattgatttagacaaccaaggactcgtacttatcgaaggtataaatgatacaaacgaaacatttcagagtaacggctcaggtaaaagtactttactgtctaccgttacttatgcattgtatggagctacccctagtggtttgaaagctgatgctgtaattaataaacaagcaaagaaaaatatgtcagtgattttagaatttgaaaaagatggggtaccatatcgtatcgaacgttatcgtaaacactctaaacataaaaatactactagattttttcaaggaacaaatgatataactcagaaatctgtagcagacactgacaaaaagattcaagatgtgtttggcattgactatctgacttatgctaatagtatcatgtatggtcagggtaatgtagaaatatttgctacagcaactgataaaggtaaaaaacaaatcttagagaatttagccgatattggtgtttaccggtatgcacaggatgttgctaaagaaagagcgcaaaaagcactagctcttgcagaagagctgaacaggcagtacattgctaaggtatatgaaaaagatgggttaactcaatcttacaatagtgctttacaacaatacgagaatacagaaaagctgattcaacaaaaagagagtgagttagctaatgcagaattagtcattaaacaaagtgagaagaatttatcagagggaagagcactacgtgaacccgaattagaaaagctaagagagcagatggcacaattaacttcccctgcagacgttcgtgaaattgatgtagaagtcgaaacacagtattctaatgttagcagattgtctagtgcaaaaacacagaatgatactgctatcgagaaattaaaaaaagaactagaagatgttaaaacaaatacaaattgctacctatgcggtgctttattgagtccacagcatagagaacaagaaattcaacgtattcaaagagaaatagcggataaagaagtgtttgttgaaaagcttaatagtgcattagaagtgtatacccctctgttagagcaagcaagagccaaacaagaggaagcaagacaggctattcaagaacatactaatatttatcataaacttaatggtgaaatgaatgcgttgtatcatgagatagatacattagaaaacacattgaacacatctattaataatagggacagcattaaggatatgttaacaagactacaagaaatacctaaacctcaatatgactatgacaaagaccgggaaatagaagatgaactaaataacattaatcaattaaagttagatgccgaagaagaagctagtcaatataaaactattgcacaagagattttctctaataaaggcatacgctctgaggtactcgacctagttacacctttcttaaatgaaagagcaaatcattacttatctaccctttcaggttcagatattgaaataaactttagtacccaaacagagaaagcagatggtagtttagctgataagtttgacctagaggtagtgaatggctctggtggaaacacatatcaagcaaactccgaaggggagaagaagagaattgatttagcaatatcttttgctattcaagatttagttcagtcaaaagcaaacattgctgttaatttaggtttgtatgatgagtgttttgatggtttagatgcaattggttgtgagaacgttattaaaatattgaaagaacgccaaaagaacattagtagtattttcgtaataactcactcggagaacttgaagccattgtttgagaacgtaatcactatgaaaaaagttcaaggtcgttcttaccttgaagaaagtaaataggtgattacatgaagatttatacattaagtagagaattaaacgaaggtactatatttgtacctacaagtagtagtaatgaagggaaactattcagcttcccgttagggacactattcgattggtacccttgttgcccaagatatgagtatcagtatagcacttctcgaaaaaaactatatttgagattgttagactcagacaaaacattagtagctagatacggtgttggggataataaaaagagagttatttcaaaaatagcttgctttaatgagaatgaatggtataatgaagaagtggcaaatgagaatgcagagttgtttaactttgctgaacaatatgacattgttacacctttaaaagacgattatacattaaaagaagtagatgatagtatttctaaagtactggatattcttgatttactttatacaaaccaaaaagttaaagtagaggaagagctcataaataaagtagatactctacaattgagcaagccagactcagatgaacttaaacaagcgtataaggacatatctgagtatatgcggttagacagagaggaaaaggctacttatgtgttaagcaggtcactagactctttaaatagtgtttatgaaaaatttggtaatgtgtatacaatgttaaatattatgaggaaagtagtggcttaaatgtttacagacttgttatctaacgaattaggttcacctaaatatgcagtaagggactacaggtacaattgtcctttttgcgactacgatactaagtataagttttatgttagggtagaagaaggacacccaaagaataacttatggcattgttttaagtgcggtagttcaggtaacccagtatcttttgtaatgaagtattacaacgtgtcttttaaagaagcgctagagatattagaagaatatggctataggtttaataataaaaattatgtgcctaaatcagataagttaactgatgaggaatacttattacttcttctaggttcgttaggtaagccaaaagaagaaactaaacaagctaaaaaagagttagtcgcacccccattgccagatggttttaaactactaagccagaacctgagagagccagaagcataccctttcttattatactgtaataagaggggatttacattgaatgatatttacatacacaatattgggtatgtaaaggattcttgggtaccattagaaaatggtaagtcagtcagacttaaagaccacttagtttttttaactcatggaaaagatggcaagtatcaatattggaatactagagctattgggcaaagttttattaagtctttgaacgctccaagtaaagagggtgagcattcaaaaaaggacactatatttaatattaatagagctagtcaaacccctcagatagttataacagaaggtgttcctgatgcattaacagttggtgagtctggggtaggtacttttggtaagcaggtgactgacgagcaagttgaacttattttagatagtgtgaatgaagagcaaaaaatatttatctatttagataaagatgctaaaaaagaaattaagaagttagcagagaaactatataagagacataacgagacttatgtagttataagcccaacaactcaagatgcaaatagtctagggagagaagaggcttggaatattataaataactactctgtaaaagcagatggagtagggttaataaaattaatgttatagataggagagggaaaaaatgagatatacactagaagatttacatgcaggtatgaaattacgttgcacggacagtaaaaactacagtttttggactacgaataaaatctatgaagtaactaaaaaagagtcaggttcactatgtatttttgatgattatggaattgagagcctagatgaggacatcttagtacgtttaaatggtaatacagggaacgcagaatttgaggttgtttctaaggtgatgaaggatgcagattacacagaagaagaccttgaagaagggatgttacttcactgcaaagatggtatgagctttccatggtgggctacaggacaaacctatgaaatctataagggtgaaaaaggaattttatttaccaagtcaggagacggtaaccaatactgtgctaaagaaatagtagctcgattaaatggtagtgcaagcgggtcttttgaattactagaaagaccacataaaacagagttagaaaagaaagtagaagcaagaattaaggaattaaaagaaaagaaactttgtttattctacaagcaacaacaaattaagatagaagaaaacgaaatatctatagaaatcagtaagctaagtgaagcattaaaagcgattgacgtattaagagaatttgaataagaataactataggaggctaacaaggatgggaagagtatcagtatattttctaaatagcagaaatattatggatgaggatgagacaaagcgtacttatcatggaacatttaactcgatgaaagaagcagagcagtcagttcgtgactggtggaaagcaaatgactttaagtgtggtacccttagaattattgaaggtactgaggatgggattgttcgttgggactacggaaaccatactgggttctatctatttgtaccagaaggtgctgtagtaaaatacacaatccgtgaaggcgctaagaaaccaaaacgaggaagagaaaatgatgtagcacatgacttattcacagcagacgatggagtagttattcccgggagattaggttcaaatgttatttctactggaataaaaacatcgtttgaccccaaacaatatggtttattcattaaccctcgaggtggtatgatgaaatacccaatcactttaggaaacacacaaggtgtagtggaaggagaatatcgtggagaggttggtttaccacttaaaaatacgttctctttacaattagatgcaagagctgtttctaagaacgttttaacaatcaatgaagaaggtaaacttattaacatcccagtaacagtagctcggtcaatgtatccaagctttaatgctctttatgaaaaacagctagagaagctaagtgaggagctacagctagtttatggaggagaagttagaatatctaatgctgatgagtatgtggttgcgggaacactatttatcccaaaaggcactcgtttatgtcaagctttcttactaccacgatacgacacacagtttgttgaagtatcagcgttaggtacaactgaacgaggagaaggcgcatatggctcatctggggtggtatagttatgctcatcccagaatttaaaccaccattattgtacgttatgggtagcttttctgttatgttagaaaaacaccagtgcagtgtaactttttatttaagagagccttatttaggtacctcttacgataaaatagtgaagcttattaaaatgacttacccaaactatagcttaacttatgtagggatggcagacaataaatataagttcacattaaagaataaggaggactagcatgtacaccaagaaagaagaagtagtaacagttaaacacctagttgataaagagcaaattagagtaggggacatagtaggttacaaaaagactattagagggttcgatgcaaaaagagtaaaagacacactctcagtaacaaatcaaataggtgtagtttctcgtgtatgtgacgagtatattactgttcatgacttttttgataagtgctcacgagaaatatgggcaaagacatttgaaaatttagaagttcgcaaaatagaggatggtaacagtctactacggaggtatgaaaatgaatttcgttgattattttaatcagatgcagaatttagtgattgaagaaaaaacagatgagtatgttttattagagaaagaacatggtcaaaagtatgtgacatatcaagagctagaaggagcgttaagtacagtagcacgcaacactgcatttatggtagaaaattataaccttatgcaagatattaatttaaaaattgtattgaaaaaattaaaagacagtggtacaattacagaagagcttgaaaaagagattcttaaagagttcaaaaatattgaaagtttaatggaggacgaaacatatgagtaaagagagtaaacgcaacaaacgtatcggggaattatcggaagcagacatgagagtgtgggctgagtggttagctacggggcaggttcatgataaaaaccaccaaaaacagttagaacgcttaagtaaacgttcagtatcattatccgatgtaactacgattgtcgaatttatgggcaaacggaatgatggttatatttcttctttaattgaacagcaggctgtatttgacaatttattaacaaaactaggtgtaacggaagagaaccgcttagaggctaaagcagagtacgaaaaagagttaagccttattcaagaaaaaatccaaaaagagttagagtctattaaagaaaataaagaaaaataatatgaaagaggttagctgaatgacagactacagcgcagtaggcaagaaaagtcgtaacaaaggcggacgttttgaacgtcaaatggctaaagaactcacagagtggtggggatatgagtttaaccgagtacctgcttctggggggcttcactgggcttctagtaataacgttgccggggacattgtagtccctagcgatgctaacttcccatttgttatagaatgtaaaaatcgtgaatactggacgattgaaaacttattcttaaataacaaagaaattaagaactggtgggcacaagttgtgggggatgcaaaagaaacgaaaaatatcccactacttatatttactagaaacagagcaaagaattttgttactatggcatataatgaaaaacttgttaatgagattgaaaaaagaggttaccctttgatggtctctaacataacatatgtagacgactacaaggatactcattgttacaagacatttactacagttttagatgcaataactagctttaagccttatggtagcaaagacaaagactactttttattttattttcctagtgactataactgggaagatagtctagtttatgaaacaaccataatggatgatgctaaacaaatggatgcagaggattcactagatgcactagttaattcttatttaggaggagaatagtatggctaaaacatatcaggaagctctagcaacagtacagtcgtatctcgaatcagatagtgtaatgaaagaaacctcaagtatatctgttagtttctcagctaactggacaggtgagcgggaagactacgttattgatacattgacatacgacattgatttacgagtattcagcttagaaactgcacatgttgtagctatagggaagaaactacctcaagatagcaatgagcatgctgaactccttaaaagacttaaaaaagaatttaaacaagcttctaaaaaactacgggaggactagagtagatgatagacaacgttaatagccctagtcattatacgcaaggagaaatagaggtaatagaggttatagaatatattactgctaagtaccctgcggaaattagataccatttaggaaatgttattaagtatatttgtcgagcacctttcaaggggaagctacaagaagaccttaacaaaagttcttggtacttgaaacgagcacaactggttttaacatggtcaccaagtagctatacaggtaaatgtaagaaatttttagagaatttcctatttaagaatagccatatcagagatgctcagctaatagaaataccagaggaacctattattgagaaatttttatttcaaacagcacagagttacaataaagaacagcaaaactatattatttcagccttaatggaactaaacagtagttcaggtgatgtgaaaactgttcttgaaaatacagaaaactatttaaaatttattacaacttagtacaatataatgctctttctacgaaaagctatcttttatatttatggtataatagagatagggaaattaaaaagtagaaggagcattttataatgacaaaagcacccagagtgaaaagacttaatatttataacactgaccggtactttaatattaatttaatgaaaaaagaagatatagcaaaaaaaattaaagttaaccgattgaatgaagaagagatagagagggaaatggacgaactagcaagtaacccattgaagacccctataggctacatggatagaacaaatgaaaaatcttatatactttatcaagaaaagtatacgaacgacagacttattcagaaattatttaaacatgcggggtctgtgtcttattacacagatacaattgtaccatactacataattgagcaaatatctaagaatttaacaagtgaagtaatctatcctacaaaaaatagctatgagaacagagagattgaaaatgttcaactagctttcactgcttgccctgtaacgattgactgcccagtagtactacctgatgttagcccgtatgatgtgttatttgcactacatcctctaaaaacaaatgtagacaagattcaaatatcgttcccttgtcttacagaagaagagttcgatactagacatgaagaatactatcataaagtaggtagccactatgaggttaaatcagagtacaaatataaattctttaagtatgtacaaacttccttatctatttgggctatgaacatttggctagtgtgtgatagtgatgaggactacaataaaatagacagatatattcagaaggaaaaaattaaacgtaatgctaacagagagcgtgcattaaagagaaagggtaatcaggatgagtaaagataaaacgattaaccgaacagacatagctcgaacaatctctcaccatactggttatcgaatgaaagatatattgaagattttagaagtagaagatgaagtagtagctcaagcagtatcacaaggtatttctgtaaagaatcacaaattatggaaactaaacattaaaaaaaagccagagaaggtagcatgggatggtataaactctaaaagttttatacaacctgagaaatatgtagttaaatttgtaccattatctaagttgaaagagtcaatagacacttataataaagagagcaaataaagctctcttttttgctctttctatattgacaaataacataatacaaagtatactagtgtcatagagcaacagagaggagaaaagtgtaattgaaaattctattcttacaagagtatattagagaaaatcatgtccataatggaaagaacggacaaacagttgattttaaaagaacagaaatgggtaaaaaactcacgggtctgttaaatacaatagggctgacaggtagggactatgctgtagactatgtgtacgacatgattccggaagtacagaaagttaaccctagaacaggtaaaccaattaagtataagacacctacgttaagacagcgtaaagaaccagaggaacggttactcagacgtttaatgaaatacaaaccagatattatcatcccaatgggggagatgggttgtaaaaatttattaggaagtacttctatcacaaagaatagaggagtaccaactaagaaaacaattacgaatgagaacatactgagaacggctgatgagcaaggacttgaggtagacgaagtagtagactcttttgaaacttgggtactacctatgtttagtatggaatactggacagctaacccaaacattgagaactttatcatggcggatattgatacattgggtaagtttgttcaagaaggggaacaagcatttatccctaaaaaagtagattacgaatttgttgataacattgaacgtgtaagacaaatttttggttttttagacaaaacgaagccagtaactgcatgggacttggagacaaatagtttacgtggtgacttattaggggctaagcctcttgtaatgtctatgagttggctagaggggcaaggtgtgactataccgttagaacaccatgaagctaaatggagcccagaagaacttaacgaaatatatgacttatttgagaagtttttagcggacagacagcaaccaaaagtaggacaaaatatccagttcgatattagattcttaatgaacacaaaaggatttacagagtttgaagacaacagagatacaaaaattgcttactatctaattgtttctcagaaagtagacacttcaaaacgactatccgatattgcatatgaattaacagatatgggaggctatgacgaaccgttagagcagtataaaaaacagtataaagaggactatattgctcgtaagaaagcagagattgatgctttcaaagaagctgaaaaagaacgagtagagggtgagttcaagatagcaatggatagatataagcaagaagttaaagaagctaagcttattggtaaacctactaagtccattattaaaccagtaaaagaaaaagttgtagtacctaagaaatcggatattaaacttattaatgagattgacggtggtaactttaactacgactggattccattagaaattatgcacccatatgctagtggagatgtcgattgctgtctacgtatttataatgttctatataaacgaattgaggaacatcctaagatgttggaattatggttgggcttttatcctagactaacagcaacattagcacacatcgaggcttctggtgttctattagactctgaatacgcagaattagtagagaatatctatacagaagaagaacatcggttgcttaatgaaattagaaagctaccagaagtaaaagaagtagaggatgaacatatgatgttctacaaagaggggcttaaagaaatgacaaagcctgtcaaagatagagatgcctctgttgccagactacgagataaatataaaattactgatagtgagaacaaagtacattttaaaccaagttcgtctgaacataaaggtagactgctatttaaagtaatgggacttacactaccttatgataaagaatctattaaaaaagaaacttttgacaatggggtaccagaacatcagctaacatggagagattataaaacagataaacatgcactagcttatattgcagaaaattatccagaggctaaacatgttgctgaacttttgctagagtattctaaagtaaacacactaaaaaataactttgctcaaaagttacctaaattagcatctaacaaagatggcatgattcatggttcatataacagtacaggtacagaatctacacgattgagtgcaaacaacccgaatatgcaacaattaagtagtaaggttggagaccctagacgttttgactataaatatccaattaaacgtttatttagaacaagatttgagggaggcggaatgctacaactagattactccgccctagaaatgcgtattttaggtttgattgcaaaagataaagcaatgacacaagcatttattaatggtgaagatatgcatgaggcaactgcatctcttgtatggaagttacctaaagataatgtaccaaaagatatgcgacaacgtgcgaagagtgtcaacttcggtattgcatatggtgaaagtcctttttcaattgcacctaagttaggtgtaactgtagaagaagcagagcgtatttttgaagagtactttgcaagtaagccaagtattaaacaatttattgaagagacacatcaatttgctcaacgttatggctacgtagaaacactacaaggacatcgtagactattgcgtgactcattctctaaagataagaaagtatttaatggagcaatgcgtaagtcagtaaatacaatcattcaaggaactggtgcctacttaactaacctatcaatggtatacattgacgagtatatcagaaaacacaataagcgttcacgtattgttatcactgtacatgactcacttgttatcgattgcccacgtgatgaagtggacgagatggcaaaagtggctaaatatattatggagaacttgccaattgatttcttaatgattgagtgggaaggtaaagagatgcgttaccctattgtggcagatgtagagattggggagaattacaatgatatggttgattatgatgcagaaattatcaacgagtttgcttcttaccgaggatacgtaaaatacttcaaagaccaagctaagattaaagattactatgataacaaacttatctcagaagagcaaaaagaccaaggtatcaaagttatccaagatgcaatagagtcatataaacaaatgacaatttaataaaaaaatgttaaaaatagcttgactattgacgtatagtatgttattataatatggcagacaagttttctgtattaatacaagaagggggagttagagagtgtgcttaatttacgagtagacgatttagagttcaaaacaattaaaattattgatgacaacggagaagttgtgacacatgatttacaaacagagttacaagtcaatgaatttaatgtgagaacagcatttttagagcaacctgctaagtatacttattggacttcgatactagagcgcttgcgcatgtatcaagaaaactatgagttaaaagcagagaagaagaaagcagaactatatgagccttctcgggttgccttaatcaatcaaggagtagctaaacctacaaaagaccagattgaggcacagattatgttagatgaagactactacaaacttagacagagtatagttaacctatcatttaacgtgagacaactgcaatatatagttaaagcttttgaacaaagaaaagatatgcttattcagtatggagcagaccttcgtagggaatatgagtatagccaaaaggttagtatgccagacccaatgaaaaataaggtaaataatggtttctcagactttcaatggaatttagaacagtaaaattagtgataaaaaaataatataatataaaaaaaatagaaatggagaaatttaaatgaattttcaagaacaattacaacaacaattaaaacaacaaaatattggagaacgtgaagcggtagactacccatcaaatcatttaaaacataaagaattatacttccctaaagcagaaaatggtcaaccatcaactctatatgtacgtgtgttacctcctgcagtaccgggagaaaactataatgttagcgctcgtgaggcattcttaacaactcgtaatcgtaatggtaaagatttaaagagcaactttatcttttcagaacaccctaatgcagaagacatcttagaacaagctatgattcgttggaacgcagaaaatcgtgtaccaaacccttatagccgtaatacaaaacctcgtcaacgttactacgttaatgtagtgcagttaattattaaccaacaaacaggggaagttaactacgaaacagattctaatggtcagctaatggttcgtttacttaagttaccacaaacagcttgcatggctattaatgagagcttaagtaacccaatgttacgcccacagttttcacctgatgtaccagaagaagtagcacaatacagctttatttcttctgcagatgcattccctatttcaattacaaaaccaccacgtagtaacaaacctacttcgtacaatgtacaagtgattagtaatcgtagtttaggtgcattaccacaaggttgggaaaacttattagaagacttgaaataccaagctacaccttctgtagagtacaatcgtgaatttattgagtactttattgatgtagtagatgggaaggaacctattcatcaaggagctcaaagtcaaggaacccaagctccacaatttaatcagcaaccagtacagcctcaatttaatcaacagcctgtacaaccacaatttaaccaacaacctgtacaaccaatgcaacaaaatactggttggtcgccacagcaaagccaaccacaacagcctgctacaggttttaatgcaacgaacatgggaacacctccaaacattaatggagggtttaaccaacaacctgtacaacaacctgtacaacagcaacaaccgatgggctctttcaatgaacaaccagtgacagacccttctaccatttctgatgcggatatgcctttcaatatgcagtccatgcctgatgtatcaccacaacaaaatgctgtacctgagcaacctgtgactaatacaccagagccagtaagccaaccagttgttaaccaacagccaaataacacacctagtgtagacgacctattagcaggtatggtaggcaacgtttaacaataatgaaacagttaggaggggcatactgccccttttaattctgtgttaactatccaaaatatttagtaggagtgaataatattggcaagaaaaagaaaaagtgaagaaatagattttggaactattgatttgacaaaagaggtaggactaactacatttacggacacaaagttctctaatgtatcagacagactaccaacaatgattccacagcttgattacattttaggtggaggattgccatttggacgtatggtcgaggtctttggtaagaactctagtggtaagtccactttagcagtccatctgacaaaggtagcgcaaatgctagatgtaccaactgtatggattgacgttgaaggtactgcagacccagaacgcttagcagaactaggggtagactttagtgcaggcggagtattcatggtagagcctaaacagaacaaagacggtagtaaagatacaatcacggtagaacgtgtagcagaagagttacaacgactcttaccagtatttagtaagcttggaaaacctgtattaattatttgggactctgtagcgcaaacagcttctgagaaagagttagaaaaaggtgtaggtaaccaacagcccggaattaaggcaaaagcaatggcacagtttgctcaaatcattgcacctttaatgacaaattcaaaagcattatttattgctattaaccaagcacgtgacgagctaggcagtatgtttggtggagtagactctcccggaggacacgctttacaccactgggctagcttacgattagaagtagttaaagcaagtcagattaagaataaagagctaaatgcattcggtgcagaggaagagacctatgtaggacatatcctgcgtgttaaaacagcaaaatcaaaagtgtcccgtcctaaccaaaaagcagaaatgtacttaatgtcagacacaggtctgaacttagaggaaaacatttatcgttcatgttttgcaactaataagcagtatgccttgattagtggaggcacgtggaagtcttatacaacggatgcagggcaagagattaaatttaattcagataaagcttgggtagcttatttacgttcagaagagggaagacctgttcgagacgaactatttgctaaaatgatggtacgctcattcccacatcgttatgctccatttaataatgaggacgtggatgtatgcaaaattccattatatgaatttactaaagaatatatggaaaatcataaggaacaacctaaccaagctactaaagaagaagtccccgaaacaggaacagatgtttcagatttacttaaacaggtagactaatagataagggggcatttagcccctttattagctataaaggagaggaacttattttgcgcaaaggactagcacctaacccattttttgaaatattagaaaaacatcaagactcctctaaacgtactatgactatgaacagcagtggtacacctagttcactacaaccaataagagacatgttcttaaaggcaatgagagaaggtaagagagtcctaatagagaactctgacttaagtagtgcgaactctgttgttatagagatagaatatgtaggtaatcgttggtgtttaggttatcaacgagtcttattttatggtatggagttaaaaataccacacactatccacttctgcgatgtatatggagcctatgggcacgatgctcagaaggttaagagacaagttaaggtagtgtttgagggggacaacccttttgagtagagatgttcaaaaagaggaaaaagaaatacgtaatggtaatcggtttattacagagactcatggcaaaggagtgtttcctagagatgtagaccgattgtaccataagtatagtaatcttagatataaagtctataacactcataaagactcgttcaatagtgaggcttcacgtaaggagctcaagagctatattgatgagcaatttataaagttaacaaaagagtatgatataaatggagaggtagattttccgggatatattaaaaaagctctgaatttacgagtaaggcacagctatgtaaaaggacggttccgagataccgctagagaacgtctaggcacccaagataatgaagtagagttattgttagggattgacgatagctctcaggcagatattgaggatgcagaacttattgaatcgttattatcaaaagccaatttttcagaaattgaattagcagtatttcagcagttaattcaaggaacagtaagggatgctcgtattattactgaattgtcagaaaactatggggtgtctaaaaaagccgtaaaagatgctataaaaaatgttcgtgagtttgtcttaataaatttaacagattagagtaatacctcctttatgtctgctatattagcagtagaaacataaaggaggtattttttagtggaacaaaacaacactggcaagtatgcaccatttattcgtttaattgtgatgggaatctcatttgtggcaactggtttgactacaatatttggttgggaacctttaccattcacagacgaacaaatgaaccaaggtttaatgttagtactatctgtaggtcttgccatctacaactggtacaaaaacaacgctgtaacttcttatggtaaagcaaaagaagaagcaggaaaagaagtagtcggaactagacaagacttcaaaaacagagactaagtacgaggggtgtaacccctccttagttaatacaaaggagcttcgacatgaagatagacgagataagcaaattagaattgcctaatctatttggaaaattccttgtggtagagactatttcggatgggtacactggaaccgtatctggtcactataactacgagatagaccaaaaatctgaggaaacttatatttaccctgtattttggaatgataagcttaacaaatttattaggtcagatgaattagttgtatacactaataaaaataaagtatactatgtttgtaaaacaactatagacccatataatcatgcagtagtagatgagctcacagtagaggaaggcatggacaaagacaagcgtacccttcaagcgtttaaactttttgtaaatgacctattctcatttggtagctacaatatctttctaacaggtaacctatcattagaaaacaaccctgatattgttctagttagcagtgtatcattagacaaacagaccgctaaaatgtacacagaacggacattagaactaactgctacggttttaccagagggagctacaaacaaaaaagttattttttcagtagataaaccagagcttttagggttaacagtctctgacaataaagcaactgtcacaagtaaagataaggcaggtactgcaattgttaccgtaactactgaggatggagaacacactgataagtgtacagttcagatagaagagtacataaaagttacaggaattaatgttagtggagaatctgctttagaaaaaggtaagacatacaaatttactgctagtattgtacctgataatgcaacgaatcctaaatttacttggtcttctagtagtgataccatagctagtgttaatgcaagcggtgacgttgtagctttagcattaggtgaagcagacattatagcaacaactgaggaaggtagccatgtaggtaaagtacatgttaccgtatcagacccagaaccagtagaaccaactgaataatatagaaaagaggaaagaaaatggctaaagaaatattaaatattgaagacctattaaaaccagagacattagaagtagcgatagatggtaaataccttattgtaccaacattgtcagatgggtttacaggtacagtagcaggcggatatgcatatgctgttacaaaaaaaggaacagactacacagttaatgaattaatctataatcaaaaggataacacatttaaaccttctgatgaaccaattattataactgatgataatgaaatattcttcattactcgtacattagaagacccatataactaccctgtagttgctacagagaaacttaaaactaaagatgtaaaagaaaaacaagttttacaagcgttcttagcatttgctgatgacagatttaagctaggtgtttacaatgtgttcctagcagatgaaccatttgtatatggggacaaaacagaatagtttcattataagagacccgttaaggtctctttttttttgtatatagtgttgacaatgttgtagtttagttatatactatacttatactgtataaggaggtaaccacatgaacgacaataaggaaaaatgtgttaaacaagaaatacgagatacttataaagggtacgatattttattagatgaagagaatgggtttttctatgttagcgtacttgacccagatggcaaagaaatcattagtgggtttgtagaggcggataaacctattgaagaatactataaagagctcctaggtaaatgcgaccaagatatatcgtttaaagaccttttagggttcttaaatggacgtagagacactgaacgtacagacatacgttttttaaagagagacagtggggtataattaaatgacaaagataaaacttattacaaaaaagaacacccaaggctatgtcatgaacaccctgctacgtagattttataaaaataatgtagacgtagaatttcttaataaattcaatctacctgatattcataaccacataggggagtatgatgctgttatcatagtagggtttcctttctttgaaagccaacgaggtgcgttagacacggcactgtcatctatggacaacccgtttagcaaggtgtaccatttagcaacatttggggacacctatcgtaatgaaggtagctttcgttcatttgtagacgaggttataagccccgttggtcattttgtagaactaataattgacctaactaagttcactaacacaggtacaaaagaggatgaacaaaatgtagtggctcttgctaaagaggcattagtgtttgccaaagatattatagaagagacagacaactacaatcgttatgaagttacagacagaactatctcttgggttcttcttgtagatttgcttggagagaacctatataaggtgacagagcctagtaaagagctagacaccattctgaaagaacaagaagtactcgtagatgccttgaatataaatatgcaggactatgtgctaagaacaatagggaagatgtctgcaaacgtcattaatggaacagtggtttgtttcggttatgcagaacagcatgttaacgaagtagcccataaattaattaatttttataagtcacataactatcaaaaagttattgtctttattggtagacacacaaaaggtgacgacatgtttagtgtaaggagctatggtgtgaatgccggagaggttgcctataaagttcataatggtaaagggaaagacacaacggcaaccgtcttcttaggtaaacctagtgaagctgtaaataacacactgttaagtgtgctttctgaaatcttatagtttaactttgtggtataataaagatagataaattttgataggagtgtaaatttttgaaaaacaacgaacctttagagaagttattagacaaattagatgaaccaagaattttacaaacaattattataggtagtttacaacggagctttaatcgagtacacgttggtaaatttaataaactagcacaggagtttgacttagataaggagaacctgtatagcttaaaggcactagttaaggaaattgaagaagataaagagttacacgaactttacgaagctagcatggcaggcaaaattacgctagaggctgttcgtaaagtattgttacaagatgataaatcatcgtttgatgtactatcttcttacgtagtagaaaatcaagcagtgctagctcgtaaccgagagttcggtaagttacaacgtgagggtgcttatcttgaccatctaattagcggtttgaagacatacttattagctgaactaaaagacatgtctagtttaaaatatatcaataaaaatttaaaggcaccgaaagtatcctcagaccgagaacttattctgtgcctatctgattggcatattggtgcttttgttaataacattgacacaggtggatacaactttgaaatctttaaagaacgacttgaaaagttattagaagaagtattccaagtggctatggagcaggatattaagaaaattcatgtttaccatattggagatattattgaacacattaatatgcgtaatgttaaccaagcatttgaagcagagtttcctgctacggagcagattgctaaaggaattagagttcttgctgatacactcaatttactagctaaggcagaatttgaagtgtctttcggtatggttggtggtaaccacgaccgtttccaaggtaacaagaatgataaaattcataatgataatgtggcttatcttgtagtagaccaacttcatttcttacaagaattaggggcattaaacaaagatattaaacttgtagacaacagaagtgacgtttatagttttaaagatacagttgcaggtaaacgtattaaagtaactcatggtgacactgagggcaaaaaagtggatgttaaaatccctaaacatatcaaagatgaagttattgactatttaatcatgggacatatccatacaacacgtattattcaagaagacttttcaagattccatgtgtatgttggctctcctatgggggcaaacaactactcagcagagaataacttgccaacaacaagccctgcacagctaattatggtattagaccctgagcgtgatacaccacaattcatgccagtattcttataggaggtactcgtatgggaggtaatttagtttatattttattggctattgcatacgtaggtgaaggtataactgcctttactaatactaagcgtaaagaaagatacatgattgaagaaggagaggctcctttgccacgtagttcttatgtatttttaggcattaactaccttttaagaatagctatagcaatttctcttatcttcatcataccaactagcttgcaacttaacgtaacaggtattgctttgttcacactaatggtatttgtagttccttttatagcaagaattatcgaagttgttattagaactgcaattgttcgttatgttcaaaaacaatatattaagcagttagaagaacgaaaaggtaaaagagagactaactagtctcttttttgctatattgaataatgaggtgactaagtatgaattttacagaagtaataagccctaatggggagacatcattaatagatgtaaacaacccaccaacattaatcagacgtggggtcttatctattaaaacaaaggttaataatgaagtgaaggaaacccctgtttatattgttgaactagctgaggagctaacaggtactgatgtagtgtctgtctataaagtaaaagagattggagactctatccaaaaagattacattgaagaaaaagtgacccctagattcaaaagcacaacatatctgggtgagctagcacaaaagattaaaggacggtcgataaaggagcaacgaagagttgaaacaaaaccaccattattcctagccccagtagttaatggaatcgatacattcacaggaattgaaggtaagggtttctacgaacgtgaagaagacaggcatattctactacctgatggaaaaccgggaatagcctatggagataatacaggggtttttatcggtttgagctcgattaagtgggacaaggcatatgtagacgtggagtctataacaaagggttatttgtcacagaaacagatatggtttaacctagatggtcaaagaccacaatttagaagtgagacactataatgacagataaacaattttatgaggcagatattcaagaattaattttaaataagcaaagaatattcggggatataggaaagagcgctattgtttttgagaaagcaatcatgcaaggtaatacaatatgcgattgcctagtcttcacagaaaaacgagggctcattggcatagagataaaaactgaacgtgactcgacaaaaagattaaataaacaactatctgattatgaaaaggtgtgcgactatgtatatgtattatgccacgatagccatgtacctaaagtagagcaaatacttactagacataatcataaacatgtaggtatcctagcttacacagagttcatgggagaggcaatgttaggtgagtataaacaacctagccgttcccctaaaaaatcagcttatcatatgttaaatatcttgtggaaagaagatttaataagaatgcttggtacattcagacggtacggtgataggttagaagctaatggagctaaggttatgaaaacaaacagccgttctggtggggtatctgggctttatgttaaatctacaactgctagaagaatgactaaacctgaactcattaataatttaataaatagagtaggcggtaccgaagaggctacgagagtgttctgtgatgtgtttatccataataggaatcacccagagaaagcaattaagttaagacattttaaagcaaaagagaataggggtgacctagatggggtttaaaggtgcaaaatatggttcttggaatactgtagttggtaagaactatgtaggtactgggggcagaacaagtggtagtaacacaaaacggctgtccacaaaaggctactaccaagtaggatttgttaaagaatatcagaacttgacagaaaaagatattatgttaaaattagagtatggaaaagacttagtgtctagctacactggtgtacctgcagatatgattaagttacgtaaaaagaaagaggagcaaaccctagcatctttagacacagtttattatgttagcattggtaaggaacctgtaggtaagctgtctatacgagctcagagacgttttagagaggtagggttaacatttatatacctagagaagaactacgtacagaggaagcttagaggcggtaatgtacgtagtgtagggtatactaacgcaaccaaatctcagaaacgtaaagcagatagacggaaaagcaataagtctaaaacaactagatagatggaggtaagctatgcttaaaaaagggaaagaagtaacactaagaaaattttataatattatcacagataaggaatcagtattgctaggggcacgatacacaagttcaataatgactacagatattcctattacaacaacttttgaagatgttgaggtagaccttaagaaagaaacagtcgcagggactatttcattcagaccagtaggagaaagacagattaatgcattaagtttgctaaaagaagcaagcacagcttatggaggttacggagagttcctagatgatactattgagaaacctttaatcaatagtgattttgcagtggatgttagtctagcagactctgctttctctaacctacaagagattccatttaacctatatatgtcctccccaaaagttttttatacagaagtatcaattagaggacgtaagcatatgcaatatgtattagaggatgagtcttctagcggtgtaacaagtacattagcactggtattccgtaaaaaattgtatgatggggaaacattgctaggtgtgcatacttacaccgaagcactagcaagagtagagggaattaaagtattacagtttatcgcaaacggttctgtactagaacaagtaatcggtgcagtgtctgttttaggaggtagcacaggaacaaccttgttccctatgtttgacgatatggtaatgcaatttgtgatgattgagtctgttccttgggtgcatatttcttgtgatacaggagcaatcgcttttaaggaagaagacatccgcaatgtaaccattaagtcagctagaccgggagaatataaggtgactatctacttgctagacgaaaaagttacattactaattggataaaattttaaaggaagttgacaatatatgttgacttccttttttgtatgtgctaagataactacagttgaataaaaaataaacggtatagagggagagaattaacatggactacaaagaaaaggtatatgtgggagcacttacttggttaggtactttaggagagagacgatatttagggcaaatgcgtgatgtattagctgtgtacgagctaggtagccgatacgcagggtactacacagaaaatagtgactatgattatatggttgtgtacatgccatcccctcatgatttaatgtaccctacaacaatctataaacaggaaacaaagattgatggaaataaggtagaggtaaaatatatgtctatcatggaatatgtttaccgcattgaaaatggagatttagaggctttacaaatgttaaatgccacaagctcccaaagtttcttcggagagcctattgaaggtattgacaataagcgtactcgtttagttacgtatatgaaagaactagaatacagaagagaaacatttacttatttagcaccagagaagttgtttagaggggttaatggtcgtattaaagccacaaaagcacgtatggataaggctattgagaatgacgatatggaagtagcagtaaaatgtgctatccttattcgttattttatggacttattagttgtgctagcggacggggaatctattcgtgaaggtctcacgttctctcctattattgcaaatatcattagagagtttagggaagactgtgagtcagcacaagctaagacactcattaatactgcacaagtgctattagaggcggatagagaagagattttaaatagtattaaagaccatgggttatcagatggttacgctcaatcagttagacaatatagtttaacaggtcgattgatagatgtactattaggaggatattatgactaagttagaacaaaataaagaaatcttagatatatttaatagaaaaggaaaagtaacagataaagtagaagaatctgccaagattatgctagaattagaccacgattatgactttggtacaggggacattgcttatacagagcgtggcacagataagaagggacgtttctatttagaaagtcgtttgtttattcataaactcatgccctatgggttcattttaaacgctgtagtaagtaaagtacactatggagaccaagaggagaccttagaacgagaggtatcccgtgtatatgagctagagtacaacctaagagataaggtagctgtgctaattaagaacggtaaaccactaaacttctcagaaaataacattagtaacatgttttctgggcacgtagcacagaatattcttgaacaattagatacaatgtctggttcagatatgtatgtatctgtgtataaacgagttagtcgagttaaggatgaacaaattggtaaagtatctcggttctttgatagattgatgaagtacaacaagattgaattaatttataagagtggcgttcctgaaggctttgctttggcttatgcttatcgagtagttgttgtaggagaaggcaaagtccgtaataaatggtacgaacctgtaaagagtgtggactatttagataaggaacaaacaaatccggctaaacacctaggtattccaaagtctatctttaagattatttgtgaaggtgggttagagtggacattctaccaaaaaatagctagtcgtttccataaatcattagttaacagaagtactaacaaaactcctaaatcccccactgctatgaagaagatagagaaagagattgctaagttacaacaagcctatgctcgttttggcggggtactgtataacctttatcagtttactaaagagctagatgaacaatatggtatctcccatagtaaggatattatcgaaacagagtgggaatctatatacgaccatattattgcaggagtagttaacgataactataatagtacaactgcttatgatatttctatggttgcaaacctagatttctacagaactgttcgttatctatactatcgagtatatgttgagcaagggcttacttcacaagcagaggctagatacacatacagagactacttgagagcacaccattatatgaatgcggtacctgttaagtaccctaaagctcttaagactgctcatgacattattaatatgaattaccgaacaatgaaggataaggtattgaatagtaactttgaaagtagtgtagctaaatataaatatttagaagaagtatcagttagaggtggctatattgttaaggtacctaatagtgtggaagacttaactaaagaaggttctagtttacaccactgtgttgctacttatgctcatcaagtagcagaaggttctactcgtatcctgtttatgcgagataagacagagccagatactagcttagttacttttgaggtaaaaaataataaactagtacaagcaagagggctagttaaccgtgacttgacaaataaggagcaggagttcctagacaaatggttagctaaagcagaaattggtaagtattagtttgcttaaaaaggtgaaatatgaggtatgtatagaccaattcacaatgaaaaaagcacactaaacagttgttatttcattattaggtaaaacaacttattttagatagctgatattgaccaacaaatatttcataatgatttagctattaaagttacaaaaaccctactaatacgtggggtttttgcttgtttcaattacatatgaaattttacagatgttctgctatattagttacagaagctaataaaacaaagggtttcaacccttaaaaatgatatttcatataattaaaagttgaaggagtttataactaaaatggctaaaaaagaagtaaataacagttcagtattactgaatctatacaataataagttgcttgtgtctaaggtagacgaggcgttagacgagggtaaaccatacgatttcattattgctttttgtaaagagaagttcgattttgaaattaataaacctgcattatctaggtacaaagagaaacgaagagagtctttagaaacaggagtagacttggaatcactacttgacaaacgtagaaaatcaggtaaaattattgatattaagtctaaagaggtaaccccacttcctaatgaaacatacgataacacatttggacaagtggaacagatatacaatgatgtagaggtgttagacacaatcatacaaaaaggttttaactctctaaaagaggtagactatgttgaagccccacttgctatgaaagcaattgaagtaaaagctaagataacagctaaccagttccaaggtctaagtctaacaggtttaagagagctaagattaagacagtctgctaaagaacaagcaatgactgagattattctacaatttattccagaagaacagcatgaagaagtattcaatgcaattgaatcagcagagaaagagttctatgaaaacttagatttaacagaggaagaccaaagaatcactaaagcgttgcaagcatcaggtatggatataatttaggagggctataatggttgaaaatttgagagaggtaaattataaaacattaaccttagaagaaagtttacatgcattacttgaagggaagacccttattgtaaaagggctagaacaaagacgtaagttagatgtgctagtaaggattttctcagaaggtgttgtacctgttacgcagataagttatgatacaacccctgcggatggttattggagaacaggatattggcagatatatgatttaccgattaacgcccttagcacatacccatgttttatctatgatgatttaaatacggatgaactccctaaatttatgataggggacactgtttattacacgagtaaagaggactctattaaagattccgccattgtaatcagtgtatacaaagacgatgctaacaataagtggtactacaagttaagtagagataacgaaatatatgcagagagtgagattagaagagacaggttataagcctgcctctttttttttaaatttattgttgacaaatatctataactttgttatagtataaatatcaaggatattgataataaattttggaggtgccatgatggcaaatattttagacacattaaagtggttagataaaggggacaaagttactattgaatttgataaagagcggtcgaagtatgcaaagctgactttgcacgattcatcagctaagacaaatattgtccgtaacattgttttttatgatttagacaaaggagtgtatgcttacactggtgaatacacccctgtatgggataacttattagatgatatgcgtaagacacaaggcgcagaacctgaaattaagactacaaaagtaaatcagttagctacctatgaagatgctttaaagtttattgaaacaaatggtacgttttatataattggtgaggaagtaattgttaaggttaaagatgcaaaagagctagcattgatgttaatgtactttagagatgctatggaagaactaagaggagaatacgaccctaaaaaacatcatgtagatatgacaattgaattatcaaaagatgttttgaaaaaaatggcagtacctagacatgaattagacttatctttaggtggcttaatgagagctgtatcacataatgttggagaagacctttttgaaactcttggatttgactacatgaagcaagcttgggaagtcttagttaattgcttgtcactagacaccatccatgaggtacctttccgtgtgctagacgaattagagaaagtaacagatagcatgtctactacagaccatattgttaccttgtatgccggtagagaacttaaaaaattctattcagaggaagagtactttgatgtaatcacacacaatttagctgatgtgattatggattgggcaactatttttactacagctgttcttaataatacagaagatgatgaacaccttaaagagttacagcttaactttgagagattcaagttagatgtagcagaggttctattaggtaatgttgcaagacatttgctatatgcaggagttactgatagctttaacgaagttaaccattatgttgtcggagcaggtaacctgattagaacagaaggtttgattagaatagaagagttaactggaacattagacgaccctaaagatgaagatagttctgagacagataataaagagttactagatgacatctttacaaatacaggtgatgatggtgttgaagactttacaaaagaagtagacgagcttgccatgtttgagaacgaacatgctgaggaacttttggaagtcaataacaaactaaaagataaccaagagttactacgtaaaactgtagaggcgatgggtatggcttcttactctactattgattcatcatttgaacaagaggaagaaacagatagcaaccacacagagacttgtgaggataccagagctttccaaatgttaagctatgcagtacgttcaggagacaaattacttgaacgtgtagagaaccacccacaaactgaaaaagggttgaaaatggctaaagattctctaaaagagtttgaccatacagttaaaccagaattagaagcttatttaaaagcagaagagctagcggaagacgttgatagacatgcaattgtaactacaattatccgtatcaaggacactatggaagcagatatggacgactgtaccgacccaatagagcaaggtttattctacgcaggaagcctaaatatgttagaagaaatggaatcattgttacgggctagcaatagaggttatggttgggacgtaacagctatctatcttgtcttgtccattgaactagcttatgggacttacgggttgtctgatttagactttacaattaaaaataaagaggaaactcgtaaagaagaacaagatgcaattaatggcattgtaaacttcttagccaatcttttaaatacagtactagaagaagaaacagaatcagaagaaacacctgtagtagtcgaagaggaagaggaagaagaggataaggatgacttctcactatctacagaagacactgctaagctattggcagactggtcaaatggtctacctacgtatgtcgttactcgtaaatacggaattagtatgggagctttatactctatcttatatgcaaatggggcagacgttaaatcttctaaagtagcagaacgagtggctcatgtggaaaatgacaaagatatgttaaacgcagtcattcaagactacaagaacggtactcgtttagtagatatttatactaaatacaaattatataaaaatggtttgttctatcttttagataaatatcgagtgccacgtagaggtcgtacaaagaaataacaatgattaaggtagtggtgttaaactactacctaatcttttattagggaggaacttaattgattctttttatatttagcattattacaatgctatccatgttcttactatatttgtttgggatggcttctgtagccctaattgaattagggcttcttatgggtagtcaaaatgatataactaaaggtgcacactctttgctttttacgggtgtcacacttactgtagtcaccgaaataactaagcagtgtttattattattttaaaaaattggaggatttagtatgttgtttttttattgttttagcagtatttataggtgggcttgctttatggggaatgtatgatagttatgggtacctagactgggcttcatggttatttagtattgtgataggctctgctgtagctgcttttttcacactagcagtggttggaattactttcgatgttgcaccaagtcatggggtaacgaaaagccatgagctacaccctatctatgagaatagtaaagtagttgtagaggctaaaaaagaacagtttgagattaatgtagatggcggtttggtagctattgatgcagaaggtactactatcctatctactaaaggagaaattaagcctaaaattgtgtttacagagaactatataaacaacaactggtggactcgtttcctaggtatagcaggtaaggtaaaagacacctcatcagttctttatttagactcaggtaccttagtgtacaataagccggaaaagaacagtagcgcaccagatttaaaaattaaataaataatttagaaaaaggggcttgcataaagtctctttttatgttaatatgtatttatagataggaggtaagcaatatgtcttatacgaaaagagcgttagaagctagaggatatgactttgacacaatgtctatgctagagaagatgaatgctttactagaactattagaagaaccagaatttcaagaacagatgaggaaagagtatgaagagttttctaaggagtgtgctacaaatggagaatgaaaagttggagtcttactttatgaaagagattgcacctattttagatgaaatagagatgagtgaagagttgataaagggaatggagaacaacaacccatccgatatgattacagtctctttttccaaagaagaagtagacatactcttagcaatgttagaccttgagttacctagattagacagtggttctgaattgtttagccctaatctggtaagggaagctaaactacaattaattaagaacaagctaacttcaaaatgatttctcactagaattaattagtgagaaaaaaattaaataaaactattgacaaataacaaaaaatgatgtaaactaagtttataagataaagaagaggagagatacacatgaatgaacaaaagaaagtatatgcaaaattaacagaggacgaggcagtatttgcttgtgaactaggagataaaattaaacaaattagagagagtcaagagctatctcgattagaacttgcaaaacgagcaaaagtagaccactcaacattaatcttaattgagcaaggtaaacgactaccaacattacgtattatgatgaagttgagcaaagcactacaccgagaattagctattagctttacagattaaggaggggcatcatgagagggagcctagattattacaactatttgtaccaaacaattgaaaatcgacctacggaggagctagatgtcctttatgacggtctttataaaaaagccggtgacctgtttgcaatagataacttccaaggagttaaagaaggcagactaattttaaaaatattaaaggctattagagaagaaattaatagtagaattgatgaagaaattgacctttacttgtataatatctatgacagtatatcagatgaagacaaacgagtaaattggttatatgaggtgtaggtatgtttagtgttgttaaggctgacagctatgttaaatcagacatagaaatgtatgaatttaagaatgtaaaaagtttggcattgactaagaaagagaaagaactatggtcaggcaaaattgctaaatatgttaatgagtttattgtaaatgcttatggagactaccatgggaataaaatacctgaaataaatgttgtaatcaatggtaagctaaaaaaagtcctagggtcttttgtccaattcactaacacaaacatacactatatagagataagtggtaggtttgttaaagaagttattctattacaagaaacaccattagctcaaagagcgcttgatattttaatggatgtagccagacatgaagctatccactatacactttgttatttaaatagtttaagtgggggagacctaccaacgttcaactaccatgacggtggggaagactttgaaaaagatttatgtttgacaggaacttcacctagtggcgctacgaaagaagagtatatttatagttcttttacactaggggctatcagatgccgacaccatagtacttgccctgaatgtgggttggaaacatacatgtatacacgaggacggtactattgctataatgggtgtgtaggggataacggtagaaaaattatatttagaccacaaggtgatattgcaatttatattgatgaaccaaaatctaaagctaaaccaaaagtagaggaagctctgaaagactataaaggagcgttaaagctaccttatacaggtacggaagaaataaaataaaaaaaatagttaaatgtattgacaaataacaaaacatgatgtaaactaagtttataagataaagaagaggagagatttattatggcatacgtaacaaatattgatgtagtagcagatgggttagatttatataatgggaactatgtggtggaacgaggtcaagtagttacttttaaactacatgtagcgacatggaacaatgagcctacacccgaaaatgcttatgcgattattcgtaataatggggtagattataagagtaaggttgatgaatttggtaatgcagaggttaccttcccagttaatggtcgtcctgaccaagtgacaactagtatctttgcattaacttctggatatgagggggatatgcctcgtgtaatgtcagctatctttagtgacgaaacagaaattaaacaaactgtaatgaacgttacagcatctattaatggggagccagttagtcgtgaaggtgtatttttagaacgagaccaagtagtcactgtagatgttaaagcaacattatctacaggtaagttctgggaaggtgcacaggtaggtgtgtacaataacaacacggaatacttaggtgacctagatgcagatggttatggttcagtaactttccaagtaaaaggaaaacaagggatggacacatcagctatctacgtattcgttaaagaccatgaacgagaagctacactaacagttcctgtgaagtttactaatactactgttactacagaaacttctacagaagaatcgtctactgttgatacgactacaggaacagaggagtcttctactacggatacaacaactgtagaaagctctacaacggattctacgtcttctacagtagattctacagaaagtacagtagaaagctctacagagcaaacagtgaccaatgaagacacttctactgattcaggagtagttgaaactacagaaacttcccaagtagcaggctacacagagtctacttctagttctacagagtctaaagaagttaaggaaactcatactagcactacagaacctgctaaagagttgccatctacaggcacagaggtgaactatgagcttgttgggttcggtggtgtaacattaacagttgtagtggcactagtagttaaaaaattgttgaataagtaagaaacacaatattgcgaccctcattaattgggggttgcaaattatattatttttttaaataaacctattgacatttaacaaactataaggtaaactaagttcataagataaaggagggaaacaaatgagtcaagtaagcaaacatggagaaaaacgtgtacgtgaacgtgtaggagtgaataagagctctgtagaccgacaatttgagttagctttagaacgaggatacagacaaaaggagctaacaggtcgtctaaagaaatgggtagtatcaagagtatttaactctaagtaccctcaaacatgtattttatataatggtaaatgcttcattgttagcagtgaaggtacactagttactgtgttaaatattccaagtaatttactaaaagattttgcaaaattatctaagaaaagaggaaaataaaatggatattatggacattgagtttttagaagaacataaacaattagtaaaagaacatgtagaacaagaattaaaattaatgcaccctcttaagaagttacaagtaatgacagactggttaggagatacagaagacaagctttctcaaggagacttagattacttcaatgacttaacagaaacagagctaatagaggcaatggatgctagtgaaattgtagagtcttattcagatgtcttgttagattttattgactactacaatattgatttaactggtttagaggaacagctaggtgtgtaaccatggataaggctgaaaaggtagataacattgtaagacaggtcacaggggctattattaaaacaactgcaaaagtagcttttattgtttttgttttaacctttgcaggtattttagtaggttattatagttattcatttttaacaaatgcagggtggtttgccttacctatgatattatcagtagatttgttatatgttgcggtactgttaggcgggctagcctttatatttgcagaggtctacaaagtagttttagaagtgaaaaagatagttaaacgaggagggcaattatgagtaataaaacattagaacaaagagtaatagatgctaacaaagagataaacgataagcttaacgaatcatcaattattcgtaaacaaattgaagaattagaggaacaggaagccatcttactatcagacgtagaggacttacttgattacttagaaaatattggagtagacctataggagggacttattatgaataaaaaagtagaggaaatgacaatggaagaaaaagacaaagcactaattgcaatgggacttattgatgtaacgcaggaggcagactgggtagtattagctacttgtgaagaatgtagagaagagtacgaaggagaggagtacgaagaaggggactgtgcagagtgtgaacattgtggaggagaatactttatgattgagacagctctcgagggtactcgttgtggacgttgtgatgactactttgatatgtgggacgactactttgagtttgagaatgaaggtaacccatataaagataaacatatctgtgaacattgttatgaagaactagtatctatgggaatggaagagaaattttaagatactactaagaaggggacttaatcatgaacgaattagaagaacttaagaatacactgattagacaaaagctttcaatgttggaaagttacgaaatgagagaagcatcattttggataatgtttaatggaatactgcgtactatcatgtcagtagctgtagtagcctttgtgagctatgctaagcatgtaagaccagataatgtagccacatggtttctagctctaatttgggttattttcctagcagaaggtgctaaaggtgcttatgatgctattgcattcggtattcaccgcaaaaaatttgctaaacatattaaaaatatgcgtgggataatcacaatcacacaattacttattgaagaagacgaagagaaattaaacggaggcaagctagatgagtaaagatgagaaattagttgagtggtttgtagttgccttaatggtgattgtgtggttgcttatcacgttcagtatcttatacacaatagtttccttacctttcatggtacacgaaggggactggctagggattgtgcgaaacgtactactggacattgtagtattggtaattggggttgtcgctacatggttgcaattaagatttaaaaaaggaatggaggaataattaatgggatatttagagagtgcaattgaagaaattgaacgagtactactaggaaataaaagtcgtgacaccgaagaagtttatttaaacaatgcaattcggtatatcaaaaaagagttaaagaaaaaagaggtagagccaacgtggttaaatgaaccacagacattgttccttaattggtttaacgaattatacgcagtaggtggtttaactcatgtaacagaggcagtaggttttttagaatccacaggaggtagaatgaagtatccagaagcatattctgctttcagtaatttaagtgagaatgaattgcttgaggtttacagtaaattttatacagggttattcttaaaagcacaagggggtgaattagaatgaactttcatggtaaagtatttcatgataaagtatttgacattctttctcgtgattaccctgattggcagaggtatcagacagagaaacgaccacatcccaatgagcttagaaaagactttgccattgatagtacagatagtagatatgaagagtatgttatgggagagtttaatgtagaaacggctagcggagatgttaaagtatacgcagtaggaattagaagagtagttcataaaagagctgaggaggagtaaatcaagtggagtacacagagaaagacattaaagaaggtatgaagttacgttgcacagataatagtaatgtaggttactgggaagttgataaggtttacgaggtaacacgtaataaagaccttggcttagttatcgcaggggaaggtgaaaggagtcacagaaccgtaaagtatattttagaggtgttaaatggtgacagcaaaattaaatttgaagttgtagaggaaaagcctgtacgatttgctaaggtaacttgtgtataccctcctgatagaggtcttgtagaggttgggcattgttatgaagtgcttaaagagttccctacaggaagtgtgcgtatctaccttaatagtaaactagggaaccattcgttactcccagaccagtttgtctttgtagatgaaccatcaaatgatggagaaaaagacgtagaagagctagatgtagaagctaagattctagctgatattgaacagctaaaaacggaggcagagtgtctgtttgctaagcgtgaccgtgtaaatgagcaagcacttaacttaaatgcaaaagctcgtaagttagaagaatctttagaggtactaagggagtacatgtagctaagtgtttttatgattacatctattaaggagatgagagaatgatttattatattaattttttagaagatttcgcatcaagttggagtgcagataagcgttatcgtgttcgtagaattatgacaactggtagctacgctattattgacaactatggtcatgtcagattcagcagtgacacagcacgaggtgttcttaagaatatagagcaggagtatgccactaataaggttgagcttacactagtagaagaagaggcaatgaataagcctaggtttaaagtaggggaacgagtgaaagtgtccaatgatttacaggcattcgggatagaatataagactcacatagcctctaagatgctaggctatgcaggcaaggaggctactattacacgtgtttgggggagtaacgtacgctactttattaacatcgatggtacacatcaagattggtgttggacggaggacatgttagataagattgaagaagaacctacactatctgttagatgtgttgaggcagttcaccccttttggacaaaaggtaaagactacgagataaaccttacatctgatggtcgctatcgggtctgggatgatgaggaagatggtagcagtggcaaatccataaaagaactactggacgttattaatagtagcggtaacaaatttgagctactagatgaaacaccctcagaagcagaacctagactaaaccatgacatgtctgacttagagaagatagaggctaagattactgccttatcggaagaatcttatcagctgttcgagaagagtgaagagttaagtactaaagcaattgaactgcaagatgagtcaatagctttagaagaagcattgtatactattaaacaatatttataggaggagatttaattgaacaaaaaagaaacattattaaacacaacagtaacctttttagggggaactagtcagagtagccgacctaaaggtaagcaaactctttgtgagatgcaaaaatcggatggctctgtagaatttatttttgatggaacagtattttatgtacattccatggtagtagtctatatggcaaataaaaaacattcgatgcaagccacagtgtctgcaatagatggtaactacaaatatgcgggtattacctttaaattaaaagttgactacaaagaaaatacactattattggaggagatttaaatgcgtaaaaatgtaatttgtagattagaatgtgtttcaaaagacaaagataacttaggtgaatggactgtagataatatttaccctgtgtttgaatcagaactagggaaagtatacatcctcgatgatgaaggtactacttgttccagagatagcgtttctcttattatctctagtatggctagctttggggtaacatttagagtagcaaaagataaagcagaagaccctatccctagcaatccacaaagcagtacatcattagaaatagttaaagggtacgagcacttagaggagtttatagactcactaagtagcaaccaacgtgtagtgtctcactcagtagaccctaactctcaatggcactatatcatttatgaaactaagtcagctgaattgggcggagtaaccttagaggaactactagacacactagtgtataatgtacatgttgtagtgatggaacgtagtaagagaacatacgagccactagaaagtcacacgtttaagtgggaatatgggacaaagaataccgaggattgggaaaaaattgtacctttattaggttacaaggtgtttaatactaacctcaatagtaacagagggttccatattactattttgaaataaactgttgacaactactatagtccatgctatagtaggtacatagataaaaaaacaaacaatattaggaggtagcataaagttaaagaaacagaaaagaagtatagcagaaagtataaggggctagaatttgaaattattatcacttattaccctgaacaagacatgtattttgtaattgtagtgaacggacagcatcgtacactacttaaggttacagggaaagagtgggaaatgagccctcatacagaggaagctgttattgaggtagcacttgatacatgctacacctatattgaaaatcaagaagcgcaaaagaactaggttaaggagggctatgatgataggggatttcattttatggtttaaacaagcatggaaagaaacattctgtattcatgactacacggttaaaggtgtgtacaaaacactagataaccatggatacttaaaatgtaaaaagtgtggaagaattaaataggaggacaacaacatgaaccagagacagattaaaaaacgaatgaagaaagttttagctattttaaatgaggtagaagttgtagattcagattacgattcaggtatggtattgtatgtagacgttgcggataacgagcagaatagagatattattaaagaggtatgcggaatcttaggtcttgataaagagaagtttattgcagagtgcaaagaatcaagactctatgaggaaacattgaatttagcaagttgttggcactatcttatgcaaaaagaacctaaaaaacttactatttggcatagtgttagtaaagggttctctttagaaagatacagtgaagattgagtattgttacatgagaagtattgggctgtcgctatcagattttatttaaggagatgaaacactaatgtttaaaaaagataaaaaagaagaaaagacttatagagaaggagacctccttaagactgtagggggttactatccagatgctaggttgagtttaggaatcacatatccattgtataaaaccaccaatgagggttggtatattatcaataacgaaggtagtcgggtaaccttaatcgaaatggatgctttaggcattgactacgctgtgatggaagaacccttattagaattaaaagaaggagacccattgctagtcgtgtccgaccttaagagaggtgttcgaggcttagcaggtgcagaagtacagtgtttaaacattaccggtgaaatggcttcactagcaggtacagttgttcattatgataaagatatgagccatattgcaaaggggctgttcactgttaaagagaacgattcttattggtgtgtagcgattgctattccactaaataaagtagctgaccctgattttgcattagagcatttgcttgctacgttaaataaaaaagcctctactaaacgtctgatattgaatgagataaaatatgatttaaaccttcttcaccaagagctagacgaggtgtccaacgaattagagaagctaacaaaaaacattgaaacaatctataataaccggtaggaggtacttagatgagtatgccgagtgatttagggaaaacattaaagaaacctattgtaataaataagaatcctgatttttatgaattagcggtaggtggtaaagttatctacaacgaagaagtaatggagattgctaaagctttctctaataagaagaccaagtactacctactaaacacacgaagtaacaaacaagtatgtgtgccagtgtatcatgtaagaccttacgatacccaagtagagggtcttaaactaggtgatgtcctagatgctatgcacattatgacaactgtaacgttaagagcagtaaacaagcacgggtttgttgtcgatgaggatattattgaatgtttagtagatgacgtcccagaaaatgcgcttattgttactagtgaggtatcccgtattcagccagaggattttggtaaggtaactattgactattttgtttagatatgttaggatagacttaagataggataggatacacttaggatgcacttttgtttaggataggtttaggataagataggatataggataggatataggataggataaacttaggatagacttaggatgcactttggtttaggataggatgggggatataactatgagttacgttaacgagtttgaaacaattggagattggttagatagagaaatttatgatgtgctactaagagatgggcatgatattgacgaattagataattggggaatggctttgtttgccttaagtgaaggttacgttctaacagatggacttgataaaccattcctagagttaactagagaagacctagtagcaggctacaaccactttaaagaagaactgaatgggtggttacgaggaggtaaactgctagaagtctctggtaacttagctacaattcaagggttcagttttgaccatgacgatgttttattcttagaggataacaacaaagcttatgcaatgctagtaggtattatcattgaagcaagagacacatataaaaatggtttctgtaagggttactatgtaataccttaccaagattgagttagccttatggctagctttttcttttaccttaagtagcaggctacaaaatctcctaagtagctggctacaaaacgaaaaatcccctaagtagcaggttgcaaaatgagaaatcccctaagtagcaggctacaaaatccggatgcgcccggctagcggtggagagtcaagccatgcgggttcaccttaatagctaccgtccccagattgtcggtttttctccctttatatagtaagaaaaattatttaaaaaaaatgaacttttctattgacaaaaaacaaaagctagtataatatagagcgtgtaaggaacaataacaataaaaaaaataaagataaaggggcgctattaaaatgaacaagtataaatttacctatgcagatattaaaaacctatcagaggaagaaaaagaaaaagaattaaaaaatcggtgtggtgttttagcggtagaatgcttaagcactaaacagctacaaaagaaaaaacctcgatttatggttttcttaaatactgttatttttgacagtaccgcagaaacaggcggacaatacgcaacggcaaccgttaaaaccgaaccgataggggacggacgttttcgagtgtgtgacggttggggacagctttctaatggaattattgaactgttaaaataatttataaaaaaaactattgacaaataacaaaagataaactacaataaacttgtcagataaagaaaggaagttataaacatgtttaaaagattagaagagtaccgcaaaaatttatctaatgaagaacttaaaattttcaacaatacaatgaagctattaaatgataataagacagactttcaagaaagaacaaaaaattttgataaagaactacaatatacagagctagaaaatgaaaaagaaaaaattttgatagtattagacactattcgagtgagtaacgaaaattacaagaatgttatatctgaaaacttatatcattctattaaagaaatgacaattatttttgagttactttataacttatagaaaaaaaattaatcaaaactattgacaaaaaacaaaagatagtgtattataaatttataagataaagaaaggaagttatgaacatgaatgaattagaagaagtgaaagaatggaataataaaattgaggaacaacaagaagtgctaaacaaggttattgttactttttataaagaaatcgatttaaaggttaaaatggtaaaccgtggtttgctagggcagttatcagcttttaacgaactaaaaggaatgctatcaggtatcgagctaacagcaaaggttattgcacctgataacgtgctacctattacaacccacaactttttagaatatttatttctaggggataacgaacaacgagcatatgcaaaagaatacctagacggctttttaaaatcagtagaataaggggaggaaaattttcctcctttacataaaaaaagattgacaagttaaaagaaccatgataacatataaatgtagacaagggaggggctttacatgatgaacggactaaaaagacttatgaaagctaaacgatacaagaaagaagtaaaagaaattatcactatgcaaaagaaagcaataaacgaactagaaacattaaataaaaatttaaaattaatcaatcaaaactattgacaaaaaacaacaattgatgtatacttaattcataagataaagagagggaggtttaaacatgacaaaagaagagctaaaaagttacctagagaattataacaagcctttttcaactagtatggataatgttttctcactgtttataaacgatgtgagagccgttgcagatgattttagaaaaggtgaagcgtttatatatacatgtgccgaacttatagaggaacaagccgaaacactagaaaaaagtgacttagaggaattagaagaaaaatcaggggaaagccttgttatacaggacataaacggctatttatattttgtttaaaaaaaattaaaaaaaactattgacaaataacaaaagataaactataataaacttgtcagataaagaaaggaagttttaaatatgattatcgcagaaaatgagttatacttagttaaaaatccattaaatgagtgggatatgaactaccatttaattgaaaaagaaacaggaaaagactttttgattgatataggtgacgtggcagacaatgaagaagaaagagaaaaatatgaactaggtttactattttcagacttgaaaaatcttatagttgatttgcttattgagtatagttggaaaactatttaaaaaaaattaatcaaaactattgacaaaaaacaaaagatagtgtattataggtttataagataaagagaggaagttattgacatgacagaacaacaatttaaaaaagagcatttattagaaccaacagaatggcgtagtgggggctacttagacactagtttaatcgaccaatcacaatcttattatattgagtcacgtccgagagtttacggcgggtgttacgtttatcaatatgttacaatgaaagatggcacggtttacgagctttacagcatgacggcaagcactagaggaattgttgcacataactgccacgctagaaacgtattacaaagagatgtaaaacaatatagagatagtgctattcattattaaggaggggagggctttcctcctttacatagaaaaaaaaattgtcttttctattgacaaataacaacaattgatatatacttaattcataagataaagagaggaagttttaaatatgaaattatctgatattattttagtaggtttattagttagcattgtactgctttggggctaccttagcattatgatttgcttacaagtttttagagcgttaggcggttgggatattagaacgttaacggtttgcagtggtttgctatttgcttatgtttttggtttaaaaggaatttgggaacaagggacagggaaaagcaaataaaaaaaattaatcaaaactattgacaaaaaacaaaacatagtgtattataaatttataagataaagaaaggaagttatgaacatgaaattaaacgttattcatttactattttgcttatttcaagaacaagaaagctattctattttaagttacgaatcaatagacgaattttactctaggttaggttatgacttagagagtgagtggctacttagggacttaggtattaatggaacaagtggcttagcagagttgctaacagattacaataatttattagagaatgagataacaaaagcagtcttttctgataaatggttatagtttaaataaaactattgacaaaaaacaaaagatagtgtattataaacttataagataaagaaaggaagttatgaacatgaatgaattagaatgtatttacgacagtagaaagagcttttatggaaaagctaacctagtagaagaggaaaacggtatttctctttattcatatgatacaaaagttgcgacaatttatactaacggactagcaaaggttttcggtacgtactcacaaacaacgttgcgacatattaaggaattttttaagcaaaacggactaaaagcagacactaaaaaacaaattgaaaaagattatctgtaatagttgacaaaaaacaataactagtatattatagacttatagagagagaaaggaagttgtttactatgttaaaaatcacaaaagaaattactttgggagagtttgaggcttgggaaggtgggaaagaccgactagaaacaattaaagaattggatattttagatgaagcacaacaagaaatcgagttgatgattgagggggcggaagaggtaacagaaatgactataaacgatatcttatggtttgagatggacgagttcattgcacaatttgaggaagaagaggaagaagaatagaaaaacagggaggggcttcctccctttacatagactaggagggcttgagatgacgacagaggagaaagcactaaacattgcagagaataaaggtataacagattataaggttaaagggaacgtattaagctattatactagttatccaatggaaaaatgcacataccttgtaactattgacattgaaacgctagaagaagaaagaaaagaactcaaaaaatattataaaaaaggcttgcaaaatgcttgcttataatctataatataaagaggggtggcggttactattaataatagaataaaaaaattgcaatatgaaagaatcagaaagctagaaaagagaaaaagaggtgaaccacctgaatttattttcaacggtaactattcattagaagaaatagagctattcttgcattttagaaaaaaaagtgagggcaaaaaatgagcgtggtggctttgcttggtttacttgtaaaaattacatttatttttaaattgttagcagataaaaaaaattaaaaaaaactattgacaaataacaataactattgtatacttaattcataagataaagaaaggaatggtaaagatgacaaaaacagaactacaatataaaaaagcaattggggttgcaatctttgcaacaagtgaagaggataaaaagcaactaggcaacgtggcgccattcagtatttatgagattttagaaattgacttaaataaaaatcgggtatactatgctttaaactgtggggaacggcatgcagtgtgctttactaaactacgtaaggaagaagaaacaggggacaattttattttaatcaataaacaaccttttttcttaaaagacatacacaagggtttgacttggtcaaaaagtttataaaaaaaactattgacaaataacaacaactagtgtattatagacttatagagagggaggaaaaaaggcaatgaaaataggcaaaaaagaagagctagaagctaacaatatttttaatagggcagatgagttactaggagctgtcacaatggaagaactagaaagggataacggtggaagtattttctatgctgacgggtcgcctgatacagttttatggcacatgaaaaaagagttttctctcaaaccatttcactgttattattttgatgggtggtatattgcactaattaatatttaaaaaagtttataaaaaaactattgacaaaaaaacaaactatagtgtattataaatttataagataaagagaggaagttataaacatgacaaaagaaaacaatgtatttttaaatgaaaaagaactaatgaaagaaattatcgaaactttggaaaatggttttgatggttgttactgcgacttgcacaatgaagtttttaactatggtacaaatacagataccgaggaattagaagaatatggaatttttaacgcaatcggagaaattcaggaatacgaagaggaacacttcggcgcaactctaacagacctcgggaacgcttcggcagttgctgatatgctttactatattaaaggtcacgagtttttatttgatagattagattttaatgatgttttagcagacgttgcagaggggctaaaattagataaagacttatggaacgaggaagccaccgaggaagtgaacaaggctattattaaatgcttaaaaagagaagtgccttggttagtagattagtataaataggagggttaacctcctttacatagaaaaaatataaaataagggaagtgctaaacatggaaacattagagaatttcggttatacatggcaaggaataaaagaagttacaaaagaagaagcagagaaaaacgttaaaaacggggttgacacttttctattatatccagataataccgagagtttagttatatccttagatgaattggaaacagagggggtacgctttggggttgaaaagcccgtgcaattactatttaaggtatctaacagttaccacaatacagaagaagtttactacggggaaaacgtggaagagatagaaaagaagttgcatgactcactagaaataacagccgaaaacctaacggggcaagaaatagaggaagattgggaaaactactataaaacatatgaggaagcttgggaagcaacttacaatggtattctatcacagttaaaaagtgaatgcactattgaaaaaatgtaaaaaaagtttaaaaaagttattgacaaaaaacaaagcatagtgtattataggtttataagataaagaggggaagttataaacatgaaactaacagaaaaagaactaaacacaattttaagagatgatgaaacagggaacgggggaacggctttcttaggtgaaacactagccgacttcctagaagaatcaggtattgactttacaaacctaactattttagaagtaaatgaattactagaaaataatggaattagaccgattgaggtagtgccatgttaaaaaatatcaaaaaatcagataaactcactagaaaagatatacaaggcttttggggggatgaagcaaaaacattagaagaatggtataagtcaatttcaaaagaatcagacaccgataaaatgattaatacattgaaagaatatgcaaataacaacgaatttcatttcgtaaaaggagagcaaggacaatgacaaacacaaacaaccaacaatggaatcagaagtttaatgatggtactatgaaccagaacaaccaacaaaaggaagttatcactttacaagtcgcagaaagtttcgttagtcagattttaacaaaagaatattcggtgattggtttagttattctaatgttttattttatgtttggcatgtttggcattttcgggggtgcaatctatattgctttcactcacacaaaccgtaaaatcggggcatggcaacaagtaagaagcgtatacactattaaggaggaacaagaagaatggaacaattaaaagggctaacaattagagaattgattaagaaactagaagaagtgccagaagaaaataaggacttgcctatttatacttttgaaaatgaaaactctttgcctattaagggtatttcattgtatgatgaaaatggtaaacactcacaagaaaacccgttaagttttgatgtaatcagataaggaggggcaaagatgaatagtttcatgaataaacaagctaaacaggtagaaagaagtaaagaaataaaactagtggaagaagtaagaagagaaaacgtaaagaaacgcttttcggaggaagttaaaaagtacctagaaaaagggtatacaatcagattagaaaataaagtttttccatttgctttaatatctattgacctagaaaaaggggaaaaggtcataagtcttattcttgtgaacgaatatgatggaatagcaaactatactgtaatgaaaaaggttaccttaagagaaaaagggaatagagctatcctaaaaagaatgctaacggataaagatgtaaaagtagtgagtatgtggaaaggaatataaaagaatgagcgtatacagtttaaaattactagcaatcttagggatagtattattcttttcagttatcgggatagtgtacgataataaacaggacgaaaagaaataaatatataaagaggtaaaggactatagagctatagaactataaaactatacacacttataggaataagaagaaaaggggctatatacctatatacttatatacagatagtccctaacaagcaatagtaagggaatacaggaataagagagggagagggaaaggaagagaaaaggaaaaaggaaaaaaagttgtttacctgagattttaaagaaccgacttcatcaaaaacccgacaagggggcgcataagtctatttcaaaataatctgaaataagtatagttattactgtttatagatgattatccttaaatatctgaaaataggggcgtttattcgattatatagttaactatcttatactattaatcatctagcctattactgcattcattgctattatattctatatagggggcgcttatatcgtttatagtgtaattatgaggggaacggctaggaacgcttatacaggcttatagagggctttaaatgcatagcctatttatacatatattggaatacacaaggaggaggggcagaaagttagtaggttagactgttaaaaacaaacgggggctagatgcacattgttattttactgattgagttaggttagctagctaaaataagaatgctattgtagcaacgtttataagaaataggggtgtacttttcccctagggaggttttaaaagggtataaaattcttttgttatttaattaaaaatttcatcttagctattgacttttaacaataactattgtatagttaacttgtaagataaagagaggggggaacttagaaatgaaattaaaagaatttatcaaactagcagaatcaaaaggcgctacattagaggcatataacgagctaggaggttatgaactaactagaggggacatagtagaccagaatcccgttttaattgcttacatgcaagggactcacagcgtagaaatatcaaacgaggaactagaaaacaaggagttaacagagctagcgtttgtctataaaaatgcaagttttatttatccaaacgaaaaagaattattgtcaggactaggactatagcacaacggcgtataaagcccgtaactaagttttaacgggctttatatataaatacattatgagggcttataagggcttatgagggggactaataagaatgctagaggtgggcaaatttgtacgaggtaataacggcgcaagaacttgggtgggtcagattgtaggtatagacagactagcgggagaatatcgtgtgcgtgacgttgtaacaggaatatacttttatgtatcttgtagcgctgtttatgaatgcgctagaccataaaacatttaataaaaaaatttcatcttatctattgacttttaacaataactagtatacaataggtttataagataataggaggggttgcagtggatacagtaacagatattattgatgttttaggcattattaaacaggacatagaatataagggagagcgtataaaggaactagagggacaagggaaacaggaacaagcagagctattagaagcagaagtaaaaggaatgagggaagttgttcaggacatagaacaagcactataaaaaaatttcatcttatctattgacttttaacaaactatattgtatactaggtttatcagatagagagaggaagttataaacatgaataacaacaaattagacgaattactagaagaggaatacagcacactagacgaattgctagacagtaaagaatttaaaaaacaaatgaacaaccttaatcacgtcccacaaatgcaaccgcaaagccataacagcaatacgctagcagacacgggacgttatccagaaaaataaaattgaaaaaaaaaggggttgacaagttcagcccctaatgatatactaggtacataagatagatagggaggaattttataatgacaatcgaacagattaacgcagaagtaaaacaacaagaaatgcttggtaacaaattagaagtaattcagttaggtaatgatatttacatgtatattaacggtgaaccatacaaaacaatcgaattaatttaaaaagtttcatcttttctattgacaaataacaacagctagtatataataggtttataagataaagagagggagttattactatgacaatcgaacaagtgaaagactacggcaaagcatacggaaaagagctatcaactaaggaagtaaaagaattttttgagaaacacaacgacatgccttcactaatggacttagcaaagttttgcggggcaatgaacgaggacggaacaaaaaattaaaaaaagttattgacaaataacaacacatagtgtagtataataagtgtaagagggaaagggttaaacctaaaaaggaaaatgagtacttctttcttacacaatacatatcagataaagagaggaagttattactatgacgccagaactagcagaaatgaacctaactaaaaatgatagcccattttcgtttattaatgaatcaggtgttttcattgaaccgattaagaacccgttttcttgtgagggtacttatttacaagcttgtaaggacgtagcgggagagctagaaacaaataaagaggtagggaacgaaatcgacaactatttaaaaatgcagaattggctaaataagttagcatatgaatatatttaaaaagtttcatcttttctattgacaaataacaacaattagtataatataataggtgtaagagagagggaggaatttcataatgaaatcaattatcatcaaacaaatcaaggacggttacaaaggcattttagaacgtaggaacaacggttgggcagatgaggaactaaacagctacacaacaggcgtaagcaatacactattcgagcttataaacgacttacaagacaatggtgttatcagtgaagaggaagccgaagaaatcgaagaagtattttcaaacactatcgatatattaaatttttaaataaagttattgacaaaaaacaataactagtgtagtataataagtgtaaggaggaataaacctctttacaccacacaacagaaaggaagtttttactatgacagaatgggcaaacatgaataaagaagaggtactagaattacttaatgattggtttggcgttagtgactatgatacagttatgggagagttagaggagatgaaaaaagttacctttacaggtagcacaaatcaacctttactaggtggtaacaatgacttaatcggtttacctcaattctttaaagacaatgaagcagaatcagagttgccaacttatgaagaattactagaggaactagagaaagatacatggaatcttgaagcagaggacaacacttacaattatagtggcttcctagaaagtgaatcagattttaaagttattcaggcagaaaattcagacacgactattgcattttttgcaatccatacgggtatagacataagagcgggctactcaaaagcaatcccagttatttttgaaacttactacgattttcaagagttcctaggtaactacttttatagtcaaggttactatgcttttaaacacgacaacaaggaatacacaatcagtttagatgtttcggctacctcggaatatgtacgaatttatataactgataataataacaacgagttacaactagactacgaacaagaaacttgtatggaattagacaaagagagcgtagcagaatacctgactagccaaggaattgagtttaaagacttgaaacccgcattataaaatataaggcactagggagcttatacaatagagctacaagcttcctagtgtaattataaggtaaacagctataaacgcttatacgagagaataggggtctttaaaattaagtttaagcggatattatgaactgctaaaattgttgagctaatctattgacaaaaaacaaaacatagtgtaatatattaagtgtaagatgaataagaaagagagtgattggaatgagtagaaagtatagaggttttgatacagcattcacaaaagacggcgtttgtgtatacgtgattaaagatgacaaggaaaagggtacggcacttgtaagagatactagaggaggggacgagtacacggtatctaatgagggtatgatatatacaaaagacatggaaagcatagacgtatatatgccgtggtaggcttataaaaaaaattaaaaaaactattgataaaaaacaaaaactttggtattctatacttgtaagataaataaaacaaatgaaagagggaactaaaaatggaaattaataaagcatacgaaagactattgaaagaagtagaactattacaaaatgatttaatggatattgaagactattcagaagaggtttaccaagctttccagaaagtaattgacgaattagaatatgtgatagaagagggctagaccgatattataggactataccagttgacctccccccgtggttttttgaccgtactttgggggtgggtctgtttgcctaccccgaccctggggtataaatttttttggagctagaaaatttttatatatttagaaagtcaacaccctacatataaagtcaacataagggctcaccctagggctcctatataggctcacctaaatactcccatataaaaaagacccctccccgttgataaggatagggtcttttttatttagctgtctgccttataattggttattaggttcaggttccgccaagcacgacctcggttacattagtgtaatgggcatacccttgtaagtcaccactctccacaatgtagtagtcagtgaactctttacacacactattatcgtaacctattactctccccatagggctcctacctctaccattacactcgaaggtgaaattattaagtctaacttgtgtgttgatagggagcaaaggctcccctcttgaatttagcatgttaatgtggctccttttatttagtattcttaggttaatagcacaaccaagccactaatgacgactaagactacgtaaatttccactaaaaatgagtatatagtaaaaacaatagacaatacagtagtgaatatcgcagaggctatcacccatttagtatttaaactattcgacaaaacaacaataccaacgataaatttaactagagcataacccaagacataaatacctacaatacttagagtaatgagtacagggtgacttataaatccaccccatacattataaaaaatatttagcatatggttactcccctctaagactaacttgttccaccatagtctttgcgaagtatgtccagtatttatggaagtctgcgaagtccaagaaatactccccgacaatctctcctgattgattgcggtaaagcggtactttcgttttctcgtctttatggacttcatactctgtgccatttaatgaaatccatacactacccggagtcacactagttactgttgccttatcgcaacctagtattgggtcacgaagttctggttttgtgaagattgtatccccaaccttcaatttgtttaaccgctctttgtctattaatgttgtttccatttgttctccttccttatacattataaaaaatatttaacatctagttactgccctcaaataaagaacattactacccatccaataagcataaataacaatgttgatacagtagcttttgcaaataccatcaaaatagaatcttctgtatttgtagtagtcttagctgtaataaaactaataaatacatctagcccaattgcctgcgcccatgtaagtgttaacaccccaaatgttggagcaattaacccgttccacaagaacatcgtaacataccctccaataacaagggtcaacaccactagaactaaagtcccaaaaaatttacctaatgcgtttgccaattcgtcttttgtattcttatccatcgttttcctccttaataatagctatatttacctcttgattttcaattttatttagttgtataacattgactactaatattataaatgcagtaatcaggactaatacaatacctccgcatagtacaataacaaaccaaggcatggggttacttaattcatttgtcaactgccaatatacgccgtatgtgagtatataggaagtaagcaaggtaattaacccatagactaccagtgtggcataaattaagtatttcatttatttaccctccattgaatgattaagtaagctattgttcagctcttttaagtagtagtcgcacctaacgtgcacaagacccatacgttcccctgtaatagggttataatgtaatcgtgtaggtactgtgtactcattaggtatagataagtctaattgggtagttaaattgactactctatccggagggtacatccatagaggcttattacagtgccaacatgacccactttgtagtacctcgtattttcgtttaagttgtttttcttcttcccttgttaattggtcgtgatagcactgtgccattacgtatgtctccctccgtttttatatttgttatagtttagtgttaaaccagtcctatatcctctcctagcgtttacaatagttgtttagggtgataataggtagaatacctattatcaccctaagaggcatatagagtacttataggactggtgcttagttaactgttttaagtagcatggaaaatatgcgcttaagtcaacattagttcttttactttagatgatgtcaattgcgatataatgatttgttttggatacattagcaatttcatagtctaagtatggttctagtacttcgttgttacttcctatctttgttctaactgttatggtagcccctgccgtggggtaagtaacgagtacgtccactccgggcttcattaacttaattaaatcttttaacttcatctttgtctcctctttaatagtatatgcttaaatctattttatgtcaactgcttaatttttgtgctcgtagttgcacagatattgtatcaacaatgactgcccactgctcctccgtaaaattgaaatcaaactgtgtatagccttcctcacctgttgtagtaattgcaatgtccccatagtcatcaactgagaaataaatagttgcagtcgcattttcctccggattttgagggagtgtaatagctaattccccttgctctactttcatctatggtgcctccttagctctcttccttctcaatcatcttgatacctgtaaaggcatatacagggagttcttctgtgtaagtgtactgattagctttaaaggtcacttcgtagtaactctccatgccacagtgtaacatgtctacatatctaatttccttacaaggcatagcgtttctctcactcccgcagaagagccagtcttctgtacagtattctactctacctgtgtggatacttctaactgctacgtatggtttttccatctattcttcctcctgtgtaatctcttctaggtcacaagggtgtacatctagtgttactatctttagactatgacgagagtttcctcgtactgcgtaaacaccatctgggtatactttttcaagatatacagtatccccaattgtaaacccatggtcataacgagtgtctccaataaccttaaactgtctttttatcgtatacccatacatgtaagcccttgctaatacatattggttgccttcatcaatccattcagctagcttgtcatctggtgcttcatcgtatgggtcaaaatactcattagctaataagctcaacattgagtcatactttttgattgctcgtgcaacaaaactaggtatctctacttttttagccatctattctcccccctatttaatcataatacatacaaaatgcagaaaaaagctaacatcaacaaaacaacaccccatccagctgttacatatgacatatagaaaacgtatataaggtatattactgctataattgttaataatacaagtatcgtgttaatgagcttttctaaatcaatcattatacaacctcctaatcctcaaaagtataaatctagttcttcttatactcttcctcctatttatatccaaagaactttaagtaactttctgcttctttttctaagtgttcgtttagttcatctagggtaacaacttccccacagtcctcacaagtataagtctgactcttcttatcttctaacagttcaccatcacatacaaggttgatacagtgggttgcccaactccctacatcgtccggtaagtgccccattatacgtcacctacttttacagcaaatgccatgaaacgttcatccattttgcggatttctttctctgtaaaggtagggatatcttttaggtagtttgtaaagtcaggagaccctaatcggtcgatataactgtatccccaaccatctttatcttttgcgataatgatgtagtactcgtcttcttcctcttctaccgtatgacccagtacccatgctttggcaagtttctcatggttttctgggttattagctaaccaaaagtacatcttactagggtagcttcctttgtcaatcatgttaataaacgttaagttctcttctttgcacttgtcaatatattcccctactttataaggaataacaactttttcaggctcatctaaaccatatgctaaggagactgcttttgctatccctgcattgtagcctagagcatgagggttcaacgtaccatcacaccctacttgagtgaaaatctcatcacctaatagattaataaattcattcttatccatttaattccctccttaaaactcaaggctgttttcaataagttctgatagtcggagcatcacctcatgaggtaactctaattttgtactctcctgtgattctgcagagctgacttctaaagtgtactttacttctgttttctcatttacacgggaagccttcttctcaacacatactttataaagtgctgagttattgactgcgataattttttcttgtatatttacactagtattgctatcataagtaatttcatagctcattataaaaacctcctatttatacactggtacagcaaaagcccagtatctttcatcaatttcttttatttcttgttcagtaaatttgttcttacccatattaggcttatttgagaagtatacttcattattgtgggacttgtcaacccaaagataacaatcttcccctttattaccaagaccagtaaacacgatatggtaaagtggctctttctccacctcgtacccatctttcattcgtattaaagtttcaatagggttattcttactttggtctagccaacagtcgaactccgattcatgtgggtagctgttaccatctagcattctaatttgtgtaaaaatagctaggtctaatgcatgtttatttccctcgtaccattccgcaacaaactttggcacaattactttcttaggttcgtctagtttctttgctagcaaaatagccgccttgattgcctcattgtagcactggctccgatttgataactcttgaacgactgggacgtgactgaactttaactcttctaatgcattaatcaattcttgtttattcatttaatttctttcctttctttcaatagcccactggctgaatgcttgtaagacttgcaactgcgcaatttctgtcatgtatctataatttttataaacagggctattccgataatctggttttatagaattggctctcagtctccaaaatagttctataggttcaatatctgttaacgtatatttttcttttaaccaacccaaaacaatttgttgattatcacttagctctacttgggctaccttatcatcagtgtatttgaaccaaattttctcatatgttgtttgtccgcctgtgattgttacaaattcggcgcttgggtgctcattttgaaatttttctagttgttcttcgtaatgtatatccccaacatcaaattctttaaatttaatcattgtactccctcctgttctaaaaaccaatcagtaaatgcttgaataacttgcgcttcctccgttactgataaagagtaatatgcctcttctgttttagggtcttcataggtctccccaatacgttcgagcgcctcgaatagggaatctttactacagtaacctacttttaaccattcaaatacctgtttctgatttttattcagttctggctttttaactgcctctactgcagtcttatacgctatttttaaaaggtctccctcaaaactattagggaaattaatttcaccatttgcttccatatacatataacaaactctgtcaattatttcgttatatctttgtctactcattcactattcctcctcgtcctctacgtcaccccaaccaaagctacagtaggaagagaacacgtctctagctacttcgtctatctcctcattcgtagcattatcaggtacttctactgtctctatttcaccaatacctgcccaagttgtctcaatatatacatttatttttcgcatagtttaatacctaagactacatagtcatctttctgtgcataatctgtgatataagtaacttttgctttaacaaactctcctgtatatgacccacatgtgtactcatttaataaaagaatatctcccacatggtaatgtctatcatttttacgtatttcaaatagttttctaccttccttaactgctttaaagtacgtaggtgcaatcttgaggttatgagtaacttctaatttactaactaaatcaaaaatgatagtgtttaattcgttaccctctacctgatgattcaatttttgtaaatttattgatattacagtatgcctacctcctctactcccataaaggttattctgttggtctctatattcctctgaatcaataactaagtttcttctgttatgcttagtaagtctttccttttctgcttttgcctgtgctagtccatttattgttttagatacttttacttctccatttacaataacttgtactaggtatctgtcgtcctttgttgcaaacttattatccataattagtacctctctttcataatcttaattgaccagttatcgttgttactgaatacccgttctaggtcattcaatgagttggtatttacaatttctttttttagttttctatctgaactaatattaccaaatcgtttaaggaatctttgtttaaagtgggcataacccatgtagtcaaaggtaatagtgtgttctttaccaaatataccccgctctcttagcttaatctctacactctcataagaattatctactttcataaaattatttagaagagtgtgcaaatcaatacaaatagatgcccctgcactaccgcctataagtatatatttagggcactttatatcggggtaacaagggtcatctaattcataccacatattatttacatctaccccataccatacactatttacatctactgagactctttctgtcttaaatggttttatgcaagtatacttcattgtcgctcctccaaatcatctaatacatcttctaatgttgtgacaaccccctgcaaataacccagttcatgccacccatatcctctcttatcttgctctaacaaattattaattctttttgttttacgtttaatttgacgattatatcttctttttagtccctcttcaaaggtcgttaccttttttgcttcctctatatcttttaataattggtctagcccatctccatcagtaccatagctatacactagcgctttctcgtccttataggtagttactcctaatgattggtatacatacttcttactggggacaaatacaagagtaatgggtctgtacaattgaggtagaagacaatcttctgataaccccccaaaatctgttttagaagataccttctctaccacatacctcatatcttccatacttaacgacttaatacataaaatatatctgttaataaccattttctttagctccccctacacccaaaatagttttcgattctctgttggtttaaaagactccaattctcgtgaagtattactttttccatctgttaaaccttctttcactttatatattaaaaaaataaatctagctatctacaaatacattgtatcatcagctagattaaaagtcaacactttatatttaattattttatattacaatagttctttatctaaaattgttttagggatagcccatattgtagtgtaacgaacccctttatgattacctgtaactaatacgaacgttgccgtatctagcttagtaccgagtacagatgctagtagttcatggtcttctttgctaattggtacttcaaaatcaagttccccaagctctaccacaaagttatttgctctaattcccataaagtattcatcattacgttttacatggaatacattcttcgtatgaaaactttgcataacaatatttgcaaaatagctgttatctctagctacaataaatctatctacatagatagcctctttgctgagtagttcttcaatgcagttactcataacatattctcctcctcttctaatagtagctctgatacgtaaatttccatcattagactttgttcaatcccgtctagtaataaatgcatagcacacaagccacacaacatttcatctaaataaaaatcaccacatgtctcctctaatggtacttgacacattaagcactctatcattgtacagccctccttaatttaagttttctctaacttctgttagcacctctcctaatatattaagtccttcccatttactcgtatcacgagagcgtgggtctgattcacgtaaccctatcccccatactttatcaaaaggcgatgcctctgcaaacttagttcctttagggatggacagcataaagttacgtaaactatcattttgtgtgaatttataagtattcccatctaaaacgattgatttacgatgctttacccacaagttttcttcaaaatttttaacttgtctccctaaacgtttagcatcttttgggctctctgtttttaaaattctttttgctgtatcaacatcgttaaaaagcattgctttacgtaccatcatgtagtgctctgctgtcggaaaaataatatcttcccctaaacccttaataggtgcgctgaactgtgatgggtaccactgtgacaagcactctttccctagtttattacgtttacttggggtatgcccccaaaataaaatatatttactcatctaatgttcctcccaatattcatagtagtttcctttatgctcaaaagcaaaatgagggctaggtaacccaccattagcttctatatgctctgggtgctcatagaaataatatggctcctcaccagtagggctaattgctattactggtttatctttaaaaaatagtggtattttatctccatcatttaagtttaatttataggtacttaatggcactcttctatgacattcttccagtgttctatacttatcaaagctaattattttaaggaatcccttagcttttagaggtactaaactatctactgaaacgtcttcttgcttataagtgacaagggcactataaatggttgaggggtttttgtatgccactgaataattaattgaagtgtgcttatggtttgctaaaaatttctctaattccttagataaaccataaggtgtatcgctatcaataacttttactttaatcatgtgttatcctccctatatgcttctctaactgttcctatactttggtctgggtctggtttactaaatggtaagcttgcacgctcttccttactcaatgtttttaagcaagccacatgtactgcgatgacccctgacttagcttccatgctgtccggaagtgtaagtatatagtcattatacagtttacttaacactagccaataacgattgctactacttttcatattagctaaaatcatcattttttcatagtaatcttgccccatacaagaaagtcctcctattgcagattggaggagctcatcttcaagagctaagatagtatttgcgtaccctttcagctccttgttaagcccctctatagcaatctcaaaacattctctttctggagagcctacagttaaatcgttaagtggctcatatgctcttacttctctcccactaggggcttgtcttcgtttacctatacgataagagtctttaaactcatactcggaacgaaaaatttcttcttgactatttctcccagaccttcctccaaaatagcaatcttctactactccaccaagaccattataatgtcctctagttgtccctatgactttagaatgtctaatatgggttagctgacagagctcccctccgttatcagggtcacctacaatagctgtctcacatacaggacagatatatccaaaacacatcactttatctacctccaattaatatacattaagaaaaagttacaattttttcacaaggaatatcatagtatgcctttaaaccataatgttccaacatgtattctttagcataatctacaaggtgctcagggcatttaaatgtgtaagagccactcatcattacaccactattacttaactcttctctcgaagctttagcaaaccacttagcacactctacaggataaccaataacacaccctaaaacttcctcgtcattaaaccctagcttaattgattcattgtatacttctatacttatcttatctgatgctactaggtatatactaccatataacctcgttttataataagagcgttccaaacaacttagttcttcttcttttaatacgattgctacacgatgacctaaattaaaatctaaaataggctttggaaaaacgtactctgctttctcaacaaactccacttagctacctcttttctcattccctaaattatcttaaatgttatattagttagaatggtaagtctctattgtattcttcctcttctggaatatataggatattttcaatcttttcttcaatatgtccaataatctctgtgtgctctttaattttctctttatgattttctctttgcttatttaac

SEQ ID NO: 3 - DNA, 72177 bp, Bacteriophage F770/05
ggggtatactgctggtggattcgcagcaggctctagaatgctgtgctctgtcatcgcaatggggttctggaaataatggcattcatcatcaagcctgacatgcaggtagatgttcctggcaaagagcgcatcagtgcgctctctgtccgaggtacggtactcattctggatgggcaggagcatgactttgctcctatctgggatgggggctatctgcctcccgaggcttatatcgggagaactcctttccaggagattaaagtagtggacggggatgtcttcgtccgctacatccatcaggtaaccgtcgaaatcctcgacgctgaacctggcgaagtgaaacctttcaaggtgaccgaagatggtcccgtggagatgccttttgaatactatcgattgggcctcggcactaactccgaaagaagtggcgatggggaagtaccgggaagcactgaatatggccaagaaccttcgggcgaaagcctaccaggaggagagcgagccgattcggatcgaattggaagctgacgcaatggacaagggcgaggtagctgacctcactgcttggcttgaaaaggtcaaggagatccaagaacgctaccctctcccggaggaaccgaaatgactgctgatcaggtattcaaccaagtgctaccggaagcctacaagctgcttccggccagcatgaacagtccagaggccagcgtgatgttgctggccattggcttgcaggagtcccgctttgcttctcgcagacagctggtgaactccatcaacagcgaagggcgtaaagtccttcttcccctcggaccggccaagggctactggcagatggagaagggtggtgccgtcaaggggctgctcaacttctggaagccagccaccaaggaactggtccactcggtctgtaaggccaggggagtccctgccacccaagacgctgtgtgggatgccctggagcatgatgatgtcttggcttgtgccttggctcgtatcctgctctacacggatcctcaccggctgccgcctatcaaggcccaggctgaagcatgggatctctacctgcgacagtggcgtcctggacaaccccatgaagccacatggccggaactgtaccgcaaggcggtaagggtggtgacccaatgactatctcagcccggcagatccggtggattgcggaagtactgctcttcgccatcatcgccctctacgcctacaacaagggcttcgtgaaggcggaatctaaaaccaatgcggagtgggaactccgcatgatgcaggccgaaagggctgcggaagaaaacaaaaaggccctcgaacagagtctgctcgaagccatgaacgaggtaaaaaaagatgctgatgaacaactggctgatcaagcttcccgcattgctgctgctgatgctcagtctcgcagcctgcgggagcaagtcgcccgtctacgtgacgacctcatcgccgacggtgccagagcttccactgagcggcatgcaagcaacgctgcctctgtggtgctcgccgacctgtacggaagctgtgtcagccatcgacaagaactcgcaggagcgcttgaccgaagccatgcggcaggattgacatgccagaagagctacgctattgtgaagtcactggggcacgctcctccccagtagtctccttcgacaccatgcgtaacccccttagactgcggtcttcgggggttttttaatgcctgtcagaaatcaggttcccagaccagtgcaccttcttcgtgtccttcgttctcgtggatacgcttgtgctctgccaggatctgctggtcgatatcccaggaactggggatctctaccgtagtggtattcagcatctccagacgctcggctaccttggtatccaagcgagtacccagaaggattgactgagctctattgaggtcacgctccagaaaggttaactggcgttcacgacgacagatcatgctgaagaaggcagctttcacagaagtgcgtgctcgcttggtactaccgtctttcagggcgagaaaggcaccgtatctctccttagcgagatcacggatatcactggcagcggtgatcttacgaatgcgtacgacatgctccagttccttgagatcatcttcatctactacccagtaggctcggtcagtttctaggaagccaacccaggtagtcttgaagaatctgacctgccttccgttgcgctcagcaaatccacgcacatggtagaaccgggttaccttagagctatcgaacacgggttcgtacttagacatgcttccacacctcctgatccttttccgcaaccattgcgatgtactcttctagtacaaaccgaggatcaacgttgattgactccaggtagtgacggtaggcgtcagcttccatgatcttgtcaccgacagccgtcgcaatgacggtgttgggcatttccaaaacggtagtgattacctcagccatggtttcctccaggcaataaaaaacccgccgaagcgggtttctggttggtttagtaggagtccgggatgccgaatttctccttgtacttgaactcaacccactggaagactcgacctcccaggtggccaccaactgcaatgcagattggcatggtcatccactcgtagagcagatgttggattacagggtacacgtcgtagatcaggtaaccgacgaggatcgctgaggatagctcggagacaacccacacaaatttaggtgggtgtccctttgcaatccttgaagtgaggctgatcaccccactcaatacactgagtgcaatcgcactcagcaccccccagatgttagggtcgcttttccaaggcattggtactctccagcaaagttcaaggccgtatagcagccagttgccatgataaagcaatccttactggaacacacgggtatccatcaggtagttgacttcttgatcatcctacgccagatgtctatcaacagtgccagcggccagaggaacacgtagaacatgaaggtgctgaagaaactgagtgagatgaggatgggtggggtgatgatccgttcgactgtttgcttggaggggactcggaagatgtgaccgatggcgacgaagaaccaagcagcgcccaaagccaagtacaacaagtagtagttcatggtttctcctgtgaaaaaggaaagggggagttgcctcccccgatctgttacttcagcgccttggccaacttgtcagccgcgtcgccaggcatacctagaacggtccagcccttcttcttggctttcttgaagtccaggcaagcctgagctttcgccttgtcgcccttgctatctacgaaggcttgccacagaacctgaccttgttcgaccagggtcagggcagtcttcttatcagccggcaggggcttacccttggccttgaaggtgtcccggacaggctgagccacgggcttggcttccaccttgacggacttcagcttcttggctttgcgggcaggtacacggctcttcgacttcttcacggcctcggcaggcttcggctcagcgaccggcacatccttggtcaacgagggagcttccggttccggcttcttggtttccgtcatgacggtatccaccacctccagaacgtccaccttctccccaactacttcgttgggtttagtcggcagcgagcgagcttccggggcgttcttcggaacagccgtctgcaccttgttcttggtgctcgccggacccttgtgcaccacgatgctggagccacggtgaccggtgatctccacatggtaggcaggttcgctgtgctgacccgccagagcagcccccagcatgcgggaagcttccttgatgtcggtcatgctgcggttggatttcagggccaccatggcttcgtccggcagttcgaagaggatgtggtaggcacggacacgcatcttgttcgcgtcgtaggacggaacggcgatcacgtcttccggtgccaccttggccagcacgcacacgttgccgctgaagctgcccaggtactgacgacgagccacatgcaagccattcgagcactcgttgcggcgatccggatccacgagggactcgttcatgcacaccagagtgccgacggcttgcggtaccttctgcgagtggatgtcacggtaggagaactccttgtgaccgtccgggccgcccttcaacagcagcttgtagatcacgatgcaaccatcatcggcgatggggagatccccacgttcgatgaagcgcataagatcctgcacgctgtgctgacgcttggcggccacagaaccagcccggcgaaggaagttctcgataccgacagtgctgcccttggctttcgactgaacagctgcggtcagttgggtcttgagcttctgggcgtccggtacgatggttccctggtcggtcacggcgatgatggtgtcaccttcgcccacgtcatcatccgggtcttccgactctacgccgtcttcgctgaggttttccaagtccacggaactgaactgcggggcagatgccggtacagcgtgggccaggatttcatccacagccttggccagtgcgggatccttgatggtgaccttttcggccacctcttcccccacatcctgcccagcatccgtgtccggtgcgcagtcaccaggaaccgcgccagcggtgacgggagcgacgggagcagccggctcggatgcggaagctgccgagaagaactctgcgaccttcttcttcgccacgcggaagaaccgcatgatgccaccggacttcttctcggcggcctcgtagacgttgttgatgaccagcaggtcttcggagtagtccacttcaccaccctggctcaggatggggacgtacttatcgacgaatacggcgacacggggatcgccttgggggatacggatctgttcagcagaccctttcacgtacaacgtcagatacctttcgtcgaggacagcacctacgacagttactttgttgctcattggtttctccttcagccacgaatagctgttttcagtagtttgactgtcgaagcgacagtcttcttatcgcgtaaagcagcacggacttctgagatgttcagaagtgtaatcaatggtgcttctgcgattttcttcagcatgccaagcactttcttatcgcccggaacagccttgatcttttccgctatcttgcccaaggctaccttctggtcttcagtgaagaacctgaggtccatagcacacatggtattgagcaagttctcagcatcagctgtttccggctcaggcagcttgaagtcatcacgacattctttgaccgccatcatggtacgaaccaggtctactcggtccgaatcctttgtaacctgaaccagcatgtcgtagcgcagcgagcaagccttgatgaactcaggtttgttcgcctcttccaggaacttttccaggaggaagtcacgagcacttttgatgcccttcttctccatgttggtttcctgggtttcgttgtacacgactgcacccaagttgccatagttcttcagcaggtaggcagagcaagtcttgtccaaaccacgaacacacttacgcacgtagtagtcgctcttggtgttgaggcgtacgtagtaagctggattctccacccgagctacgttctcagtacgtgccatctccagggagaatatgccgttgctatgacaagccgagagcatcggataacccttcttctttggcttggacacgactggggcagcgccggtcttcgagtcatactcgattacttcagcttccttggtcaggtccaatacttcccagcccttcagagtactcagggctttcctggcttcctccacctttttcacgctacgcggaaccacgtaagcgatgagtgagtcgtcagcattgtaaccacctacccactcgtcgagatcctccacacggctatggatgtcacgacggctgtgagtcaggacaatacagcggcggaacagcggcacataggacatcggattcttcgaccagtacgaaaccaacggatacccattgtgggtgttgtagttccgaacagaatccccgttgtgcaggtgacgaccagcgccgtaccagatcagccgagtggggcacagcccttcttcctggattagaggcaacagcttggaaaccaggtgcttctggccccacttgcgtactgccagggcctgccaggaatccttccggaacttcgtgaggttctcgaagctggtacgatcgtagtggctggggtcagatgtcatcccaaccttcttcaccagccggatgagcgaagggtacagggtgtttccttggtttcgcggctgctttccgatgagggaaagctgttgcagcagagtcttgaagttctccttttcactccggctattcgaatggtacagttggctcaagccaacatcttccatggtagacatgagtcccttatgggtcagaccagaccctttcatggaacttacgagcacgcgattagccgttacttcttcaggccgcagcatactatctgccctggcttgcaccagttcttcacaggacttcgccaggatgtcactgcgtaccttgttgatattccgcgttgcacggaggaacttgttgagcagctgaagaagagtcttgcgggtgtggtcttccatggacagcgcttcccgagacggtgtgatcgacaccgagttcggtttggcttggagcaccagcacgttgacgttgcccggtagagagttcacgaacttgtgcacagggtcgtatacctcggcgatgaattcatcccgctctacgggatagatgacatcgccgtaacggacacagatgatgtggccgttgtattcgagcacctgttcggtagcgatggaccagtcttcggtcacctgggagaagggcagggtgggcagcttcaccccgttgaagttggccagcatctcggcgttggccactatacggcgaatcagcgtaccgaatcgacgtacgtcttcgttcttgatgttgatccgtacttccagaccggtctggtcggtagggatatcggtcaccaccggggtgatggcaggacggccaccgttctggatggaagccttctgcatgcggtagacgttggttttcccttcatggtgaatggtcacctggaagttgtccacgtaggcgaagggagacttgcaccccaaaccaaagccgccagtctgggagccgtcgtgcttcttggtggagccgccgtagacgccgtagatcgtgccaacgtcgtcgggatggatccctgggccgaagtcacggatgacgaattcgtcgtccttgagggtgatctcgaccggggtctctttctcgatgccgaccatcttgtgggcatcgtaggcgttgcagagagtttcacggacgacggcaaggatcttgtccgtgtacagggaactcgacagaacttggaagaaggccgggtcatcactgatgcccatggaaattgcttgcttgccgcctatcacaacgtgagtggcgtagtctttctgatgagttacctgcatggattactccttggacttggcgcgtttagcgcgacgtttctgattggtgaggtgagtgaccatctccaggtgagcggggttgcaacacaaccgttgtccgcagagatggtcgatctgtttcttgcctggcacgtagccgaagtagttggtgaacatgacgatgtggacggccactgtctgaccgtccaggctcatccgcccgtaaccaccacccctgcccgtacctgaatccgggccttgccagaggtggcaggggctgggcttgttgtcgaggacgaagcccgtgtcttcgactttgcagcgggcttcgattcgctcccggatttctttcctgcgtccttcgaacacttggcttcccctcggataaaggccatgagtttcttcttcgacaaggttccgttgaacttacggaagctgtcgtactcttgcatggtcacctgctcgtacccttcaggaacaggcagttgaccgatagtccaggtgtgggtcatgcgtgtctcacggttgacgaagaaataccgtccgttgacaggcgcatgacccaactttcctggagtccaatcagctttcagtttggctttcttcgccatgattactccttatgcagcacgtacatgcctttgatgtcggtgcccaagatgtaacccttgggcactgttggtttcccatagacagccttgccggaagcgatagcagcctcagcttcttcgatacctccgaagtgcttgatcatatggttgaaggaagcccagtaggacttccggtcagttagcgagcagggttttcgagacaacgtagtgacccccgtgttcggtgataagggagtccagggtgctccaactcatggctttcacattgcccatggccagcactgtcatcccctcgggttcatcatgatcatctcggaacagcacgagatgaactccatgtgtagcgatcatttcggcacaacgaacacaaggtgccctggtgatccaaaggacagagttgtccagtggtacaccagagcgggacgcccaagccaagatgttgtgctcggcgtggatcaccccgtagggagtggttttgaagcgggtctcttcccgaaggtactcgccgttctcgcaacagttgtcggttccaggcatggtgccgttccacccagtgaagagggcaccggtcgtagtgaccagcacccctccaacttgatggcgttcagctacactctgcttggccgcatttgtcgctatcgacatgtacagtctcctgtacttcatcgacctcgggtctggggctttcagcactgttgatacctctcgcaaagtcgcaggcagcccaaaggccgccgcattcatggacgagcacaccgtccttacgcacggctattacgccttgcgacacggtgatctcgtggtcgtttaccaagcaggtacttgtcacgcagatttctccttcagtgcagcagcatgctcacggcactgttcaatgagacgttccttggtgatggggtagtccaaagtgcaggcttcacgccagctgggccagaagatgtccaggttggcacccagaggaacccgcttgtcattgatcttggggtcttcctgccacgccatgcacttgcagagcgtgttgttgacccacacagtgacatcaggatcgtctggccacatcacgtagatcgcatcgtggatcagagagatgatctctaccttcagcttgtaggggctggccagtagcagcttgcggaattccacagcagcacggttggtcagtagaccccaggactggccggacaccgcattacccgcactgcgggattcagcagcggcctccttgggagtcgccttcaagccaagaatggtggaccccaacagcggcgttctcagccgcaggttgaaggccagttccacgtagcccgtcttggttgctttgtcgatctcaccagccacccactcattgcttacgcgatagagcttgttgtagttggtttcgatctcctgggcttcttcatccgagaaacctacctgccgcaccagacccatccaactgcccccatactggagcaggaagtgtggagtcttggctttgcttcgcaggtctgggtagaccttctggatcgagttgatggagtcaaccgtgtctatgatcccatcacacttgtacggccagaacgcaaaggtacgcatcgagtggccatcgtagccatcggtgtacaccttgattttgttcgggtcttgagtgagcagggcgttgatccggtcttccagtgcagcgaagtccgcccctccgaagaggaagccggggggtgcacagaagagagacttcaccagcttgccataggtcgagccagccggaaggttttgcaggttgggatcggatgaggacagccgcccagagatggttcctccaaggttgaaggagccatgtaggtacatcattccgtccgccttcattcgacccgccttgaaggctggcatgaaagcagagatgaccttctctacggcacccaagtccatcagagcctggatgagatccttgtacggttccgccttgatgtggttcaacagcttcttcagcgtacctccactggtggagggttgcttggtcgccgtcacgtccagtacaggaaggtcgagaacttcatgcagcagacgtgctacttgcgggccagagttggggttgaaccgaatgtgcgaaaacttgctcagcggatgctggatcgtcttcagcttggcattggccttctccatctcactggtttggatcagcacctctaccttggcgaccgctggatggctcatcacagtattgtggtagccgtcccgcagattgtttagttcagtattgacctctgtgatcttccgaggattcataggcatgcccacgagttccatttggatgatcaggtccaagctgtccttgaacaggccatggtatagagcgtcctgctggtcttgcaccatgatggggtaatacttgttcttcacccatacggttgtcaccgcatccaccgcgttgtaattcatgaggtcgtccagcggaatcagccggatgtccttgatatcgtcctgtgcccagttgcccgcatgttcctgccccaggtctttcagggagtagctgacatcagcggttgagttcagtgcgaggtacgcgatgatcttggtgtcgtccatccgtggagtcatgatctccaagccacgatgcatgccctctttatcgaggtcatgctccatgaagagggtgtagatcagaaccttcacgtcatggtttgcacggtggtatatgattcgcccagggtactcggtgaagaaccacttgagcacttcccgcatctctgcgttcggctcgtagtaaccgtggtgcttgttctcgtcctggatcatctccctgtagtcacactggatctgtacagcatcatgctcgttccaggcgaagccaatggtggcaatgccggagtcgaacatgctgaggctgaagccctcgatgtcacaggatatctccggcttgtccatgagcctggccagtgcttccttggcttggcttacgtggcctcggtagatgtaggtgacatcgtgcagcaggtcagacccaacgggccgatacaccccatgggcatggtcaacgatggctttgaagccacggctgagcctgtgcatctgcccaggatcgaacagcagcacctgatggttcacacccggagtcaccaggtacccaggatcgtaaccagcaggtggcgacagattgccgaagtccgcgtctgtcttccgcttggtccattccttgaagtacttggagtcagccacgtaggcatactggactccgagatcccgcagtagctggtcgcgatccttgatgcactccttgatcgccttggcagataccttcttgccctcgtaatccagagagatcacgatgacattcttgcggggtacaccaagcccttccagctgcttgatgtaggtggattcagcggctgaccgactcaccgctgcctccttgatcaggatagccacagggtagctatcctgttcttcccaggtgatgtacttcatcacagtcctcctagtacaaggttaatcccaacacgggtgcagagcttatcccaacccgcttggtttgaacctatgggactttcggtcgggaattccaccccttccaccggcaagccaaagtgctcatagaccctcttcagaggttcccgtaaaccacttgggaacatcttgaggtactccgacggttcgtcggacttgttgagcacctggctgatgaacgtgagtacagagtcacgctcgtctatcagcaccgggtcgtactcggacagaagactgtctacgagtactcggttgccgcgactcagccggggaaagtagcggaaattgggcttttctccaggtatcatgaagttacgaccacggtggcagaacgcacggataccatcgccgcgagctacagcatccgcgatgatcagttcgttcaacttggcttgaaaagccttcctcactggaacatagaggaaaccatccaagcagtccttcactgcccttttgaagatcaggaactccggggttctcgcttgcattacatgtcccctgtcatgaccacccgtctacgtgctcggctgaagccaacgtaaagaaggcgtgccagtgcattcgggcggtgtaccttgccacagatgttgtccaggtcgatgaacaccgtatcgtaggtggaaccctgcgacttgttcacggtgcacgagaaggcaggccgtaggtctacccagttctggtcgatcagctggaggatcttgtaatcctcttctttccgagccagcttctcccggtccttgcggtccttgagggacttgggcaggaagaagctgctgttgtggtgcatcagcttcacgaggtagccgtccacgtcaaactctctggttggccgaatgtcttcgatcaccacctcggatccgttggacagctgggcatgcttgttgatgacggcttcgttcaccagcatcttctgaccgatctgcggatcactggaaccgagcagtaacttcgagaagtgcttgttgtactcggtcacacaggcattggtgtaagccaataccttggtgttaccgtgcacttccgggtgctggaaggcgtcttctgccatctctacgaacttgtcccgtggtacatggatcagctggtcaccgtccaactggatcttcggccattcgcccgtcttcaccgtgtggcggaaagcgttgcagaggtccaacaggggaccactgttctgccgcttgacctcgataagttccaccacaatgtccttcatggcgaaggcaggcatgatgttggtaccgaccggagtcagctggcagtcgtcgccgacgaagatgaatttacagcagtcagttctgtcgaagcagaactggagcaacgcagggtctatgtaactggcttcgtccaccacgatcaggcaccggtacggtagctcgaagcgggagatgggcatcagttcgctcttgcccgtcttgtagtcggtgcggagacgaaggcccaatgcccggtgaatggtcttgacctcgtggttgaactccttcatggccaccgccagagcctcacatgcttggtttgtggtggctgtcagcaggggttcgaacggctcgaagttgtcgtccagggtagacagggcgcgatccagagtctccatttcgtcgaggattcgtcgaatcagagtggacttgccagttcctgaccagcccttgaggaccattacctgggcatcggggttggagtagaagttgatgaaggtctgaaacccggcttcctggcctggcgtcagtacgaagggagcaggcttgtctactccttcggatcgaacatgatcacttgcccgtacggggctttccagttcgatttcctgctgtacgggtgaatcaaccatagaatcggtactcctgggttgtcgttgtagtggtggaactccccatcagagaacaccaccaatgcgtgaggtttgttctctgcggcccactgcatcacaggggcaatgcaggtaccaccccggcccttcaactccatgttcatgagggcattgaggttggggaccgtatccaccgaacggatggaagcgtcgaactggatgatatccagctgtgttggtttcagcgtgacgaagatgttggcgatctccgacaggtagcggcggatctcttcgttgctgaccgatgccgacaggtccattgcgatggcaatccgcaggagtgccttaccgcgacgtgagggcaggtagtacctgttgatcagccggcgattgggacgtgcccaagtgaatccaccacgcttgaccacctggaagaactgacgcagcaggtgaggcaggggcagcttcgggaacatcaggctgtcgatgaacacctgcacttcccctgggattgagccagggttgccattggcacgggcagcggtagcagcactgaggatcaggtcgttgatggccccctggatctccgtctcagacatgggggtaccatcgtccttggccggagcaggccgggaaatgtcatcgaatggcaccgggttaccgctgccactgtttccctgagtagacgaggacaagccaccaccaccttgagtttgctgctcctggtacaggtcagcgtagacatcttccgtggacatgttggcgtacttgggatcacacacccaattgcacttggcaccagtcctgtagtccgtccaggaaataggaccgtacccacaagccaacaagttgttgttgatcacgtggtccccagcgatgttgtacagcatgggatcacggtcacccatacggaccttaccgatgtgatgccgccagacgtgttcgatctcatggagaatcacggtcttgcggctcatctcgtccagggacatgaagaacttggggtcgatgaacatggtgatgccgtcgatagcagcagtgcccatgccctcttcccacacgtacttcagacccatcatgatgttggcgtagaaactcaccttggagtctccgatgatgcgaatcttcgccttggaaagggcgatgtcttcagcagaacgatcagtcattactcacctccgatgatggccatcgccttagcgaatttgcaccactcaacttgattgtgggtttcaggtattaaggaaggaacagccagagactgggccacgaaaacttcttcttcatcaaaaatccagtgaccatttagtggattggttattcttattagctccaccacttcattaattgaagctgcggtaccacctagtcgagagtaactctggttgtattggctttcactattacggcagtgacccacataaagaccaggtgttacatatgagccgtctgggggcttaacggtaactacgtacggacaaaattcagatgctagtttttctagtactgatttagtaccgaacttgatccccttctggatacctttttcatagatgctaactctccagccttcgaaatctccagtgagtagtcgattgggggagtcgctgtttgcatactcgtcaactattgcttgacctgtgaggtcttcttgacgaaccataaaaagttcccatcgaccactcactggattctcctttagaacatgttcaggttcttcttcacccactccgaaatacgcgggttctgaatcagactcttgttacgctggcaagccatacgcagagtgatcaccatgtggtccgggttgaaccggtcgaggaagatcaggatcttctcgatgttgtccaccttggcgttatccgccagcatcgaacacatggcgaacatcagacccggctcatccttcggcacgtagatcgtgctcggggaagtcaggatctcttccaggctcggcaggcgaccgaagtaggccaggaacgccttgaagtcggtggccacggtaccaatgatgcccatggcagcagcgaggttcagcatgtcgtccagggcacgagggtcttgctccggggacatcttcaggaaccacttcgagaagtcttcccaggtacgcggacacgcatagacccgaccgctgttctgcggatcgaaggtgtagaacgcacggggactgaactccaggaatgcttgtaccttggtggcgatgtccagcttgggagccacgacttgaagccaacgcttcaggtcattccgaaccacgatgtggtgcagacgactgatgagggccgatgacatcgggttgacgatggcaccgtcggtttcgaggttaccggcacccattaccaggcacttcggatggagatcctcgttaccgatctggcgatccaagatcagcttgtaggccgccgcttgacgatcgtcatccgcactggtcagttcgtcgaggaacagaagccagccggcgaagggttctttggtttcggggttgacgggcaactcgtctccgaccagggggaactgctcgaatacctggaacttggcacgctcgccggagaggttcggcagaccattgaggtcagccgggtccatctgggtgagacgcaggtcgatgagcttcaggttgttttccttggcgatctgccgggccactgccgacttaccgatgcccggcgaaccgtggatcattggcttgaggccagctcgcaggaagctctcggcgatgaacttggcgtcgaaaatggatacttcttgttcctgggggaagtgcatagtgaactcctaaacgattgatttgattggtttaagccttggctactacgtctttcggtgttcccggaaagcgtgcagccgaccgctgacatgccagcactcgggcttggccgtgttgttgaccctggtgtagctgccacgagcgtcgaaggtcagcatggagtagccttcgggacgctcggtgacagtgaagatcaccacgcgagaaccatcacgagtgacgtagttcccagggcggtcgatgagaacaggtaggtcttgcagcttgctcatttcagcctcccggtgctgaagtcgagggtacgggcgaactccttcttgcctgcttgcggcttggagtcttcgcctgcgttgatgtagtactggtggatcaaggtattgatcaaccgcaccccgatgttgctatcgggatactggcgaccgatctccttgatcagccatttctcggccttcttgtggtcttccttcgggaagagagagcggtagttcgcccacagttccgactccttgaggtactggaccatcgcctccagagtcggtttctccaggttgtagaccaagccagtgcgaccgatgaactcggtcttgacgccgcacttcagcagttcggtggcgtccatgttctcctggccattgaaggcaccggcgaagatgaacagggaacgctcgacgcacaccgtgttgtacttgccgtagtcgccgaaggtctgggtggtactgccctccagcacacgcaggaactcgttctgcacaccgatgctgatctcgttggcatggctgtcgttggaattaccggagaggaacagcttgtccatctcgtcgcagaatacgacgttggggacattgccgagggtagccagtggggccagtgccttgctcaggctcaggccggagtagccttccttggtcagcgatgcacagttgacctcggtcatgggcagcatgatgtccaggcgattgcactggtccatgatgttgaaggacttgcccgaaccagaagggccggtcaaccagaagtgaggacgaatctcgccttcggacgctttgaagatgagaaggatcttgccgatccgctcgattgttttttcattggcttgggacactggttagtctcctttaaacgggaatattaataaatctgggaatgcataaccccaaatattactcggaaggggtccactcacctacaaagagtagaaaggtattgtgataccccatcatggctcgcatgaagtcatgatgactgcccccaggaagcagatgtcttgcttcttcgagggcttcttttaaggaactgtgggttgggtagagcttctgctccaccggactgagatcgctgaactgcatgttttcccctacttaataccgtacttgcaaagatctttaaaacctttccaagctgtcttgataattttggttactgtcaggccaaatactattggcaatgcaatgggccacaatatccctagggttactgaacgatcagccttgtcgtcgtagtcgtcgtacagtacaaagtcgaaaagaccagctgctactatagcggttgcaaagtaggccactatcattgctatggcatcacctgacatagtgaaactccttggtttaatacacacagtagaatgccgacagttactcagtgactgcatcctgtgcagtttggaaactcggcattctctttatgtactaatagtctgactagactgtctcgccttatgcgacgctatgcgcagggagttgtttaaaggattaacgctaatgcatgtctcttgctcctaaaccaataaaagaatgaacaaacaggacaagagcgtacggagtacgctaatgaataacctgttctcctgtgaggtacatcatcccatctgtaccgaagcggcccgccagccaacctcggaagaacccatgaatcaaagggttgtcagcgtagtctccgagacggctacgcttactcgccagttcttcaggggtgatgacttaccccggcgaaggaccacacacagtggcggtactcttcttcaaattcctttcgcagttcgtcgctgatcacttcagcatagaacgcaggttgttcagcagtgcctcgccacccttcagggactggacgtacaagcacgcatcgtagacggtttcgtccaaaccatgcttctggacgtgttccttgccgaagccaagtgcatccagtacctcggccagcttattgcccatctgggtgaccacggcatccttcaggacggcagtagtctgctcgtcttgcccctgcccctgtacgtcgggatgcacgatagtctggttttgacgcagttcgaagaactccttatccagttcttccaaccgcttcacgtaactctgtacgtgcctttccgtggtatcgatctcttcgctgagaatagaccgtttgttgtgaagcacggtgatttttcggcggaggccatccagtacatttttcaggctactgagttcatgctcgatacgttcttcgctcaacattatttgttcaccccgtagagttggaagtggtcgttcagttcggtgtagcggtagccatgcttgtcgatcactgcaatctcgaaacaggcatggccgcaccagttgtagtgggtttcggtgccgatctcttcgatcaccaccttcttccgtacacgctcacccggctcaccgggcagcatgaccagggtatctcctggcttgatcttggtagaccacagaacatggtcaccggtaaattgggctttcaccagttccttcgctccagcggtaagctgtacgcaaaggtgctcctgccccttcacgtatacggctatgggtatgttgtggctggagcgtcctaccttgataccaacacgttggttggccacgatgaagccatgacggacatagacgaacttgcccttcagtgcggcgtacagcttgcccacggagataccggtcatgaaggcgatctgaagctgaccgaggtcgttgtggtaggcgaactgaaccagcttgccgtctgccaggaagtacaggcagcggtcgatgggaacatcgatggggttaccacgctgaaaccaggtgatcttctccatcacttcttctccttcaccagacggcgatgagccttcgacaggttctcgcaggaacggagcaggaggtgcggattgttgctcttctggaagttggagtactcccgcatgacggcatgaaccagggtgtccatggtcagttcagcatcgctacggcgctgcttgcgaaccttgtccttgagccgctcgatttccttcatggcttcggcgagcttcttctccaggccagtatccaccggctcgaagactgtctcttccgggatgatctcgggagttccttccggctccacggggaacggcttggtgagtttggcgatcttcttgtcgcgtgcttcgatggccgccttcagcttgctgatctgggtttgcaggcgataattatcgctctgagcacgcgagtagatccgacggtagttcttggcttccgagagtgttgcgtctagcttgttgttcagcacactgatgacctgatctttgcgttgaactttctgatcacagtagctggtcagatgggacatggcttcattgaaacgcttgcgggaaacgaatgggatcatcggagttctccatctagatagacctgaacgtacttaccgttcaaggtatatttgagttgtaacgtgctgccctcgtaagcatcatgagagatgtaacgcaccctttcatagaggtagtacatgaggtcagcgactgcgaagttgtcagggtattttctacgggctgccctgtacccaacacgaacccaatccattgcaaggacagatgcttggtgtaacacactccttgctactggtttgttgcggtactgactgtctctctccatggcttcttcgacaagcttgcggagcatctcaaggaactcttcctcttcgtcccccagcttgaaccgcttgcctacgttgtcgatgagaaagtcgttctccattatgaaattggcgatgtcgtagtacatcacatgctccggtcgttcctccgcctgacggaatctactccaccaagaggtctccccccggagccaccacattgcaccaaaggcccgtaattccgcttccaagccctcggtgctgtcgatgtgctcaaacgagtcatgaatgactgtcatgggatctccaggctcaaaggtgtgcatgccatccatcagccagccaccatcctcgaaagtgaaattacggacctgcatggcttacgcccttacacgagcgttcagcttctggagttcctcgtagatgccgtagcccaggaaccagaaaccgaaggtcatgccgatacccacggcggcgcccagcatcacgaacagggcgaccaggccgttgtagacggtcagcgaggcgactgccacgactacgaagaccagcacggcgacgatccaagccatggtatccaggaacttcaggtaagacttacgcatggtattactccttcttcaattgaatgaactcactggaaatcagcgaaaatgcaaaaagcgtacggagtacgctcaaccccgactcttcacaatgcagtctccatgtgcgtagaagagatcacggtagaacttgggagaccctccgtacttccgtgccctctcttccgcactgggtactagcactattggcttaccacagtacttgcatgctctgtgcttactcatggtttctaagctcccctcaaaaaaataagcgcccgatcccatttctgggatcaggcaaattcgggttcatggagcgtctggaagacgccccataagctcaagacagcgcatactcgctttcacggatcagttcagacagattgtggatcgaccggtcgtagctgacatggcttccagtgatctggtgaacgatgtcgtcgaggatgttgctgtcggccagttcggcgaagatgttgatgtagtgctggcgcatctcgttgcagaagttcgggtggcacttgaactcatcatgcacggtgaccagttcgaagggctcgtgaacccgcatggtgtcccacagggcacacagagcctccaggtggtcagtctccagctgatgtacgttggtagcgttgatgtggttgaagatcactgcatcgaccatgttggtgcggtcgtacaggtcttcgtagacggccagcttggcgtccagggtttcaccggcttcacactcaccagagtgacgatccatcagttcagcccaaaccaactgcattaccttggtgatggcttcacggtcgtagttgcagcgacggtgcatggaacgcagcacataggcgtcgatggagtggatgacgttggcagcattcttcacagcacgctctacaccgcagtcctgcttgtagatgtactcgaagcttgccccttccatctcgtccacttccacccgagtctcgaacacgtctaccgacttgacgatggagtggaagttgtccggcagcacccaggagtgcttcatggcatagggctgccaagtgttgatcaggtcatcccgcatctcgttggcgatgggagctaccatctccacgccctggtagaaagcttccagttcaggagtgtcttcaccgaacaggttcttcggctcagccttcgaaccgtagaagtgagtcatggttgcagtcttgatgtctgaccgcttgatctcccctaccgactcacccaggtgggtagaggcagcagtggtgaccaggctgtatgcatcctgacggaagccggtgttgatgaggttggtagcttgagcaccagactcacagccacccagggcggacatgatctgcatgccggagcagcaggcatccagccctaccaggtgaccaacaggctcaccacgctgggcagcacggatggccatgacagccttgaggtactgaggacgggtcttctcgttgcactccagattctccagatcgtcgaagttgtcgtagcaccattggatacgttgttcgaagagccacttgtcatggcccatttggtttgcagcgtcgatcagaaggtattcgaaagcggtgtaaggggtcatggtttagttcccattaaacgaaggttgattggaatcaaagaccgtagatggtcaacagtgcttgaagttctttcggtatttcctcggtataagctacaggcatgtacttattgaaagggttgtccttcctgaagtgaaaccagtaagcagtatttctcctctttgcggtcattctgagaagcactaaatcccgcttatctggtcctttcagaccagcttggtaatatgcttggtccgatacaaccctattcatctcatccgtgaacaggtgccactcaccattgtgaagccatgcagctacattcattggttagtaccctgcaagtagtgcaatagcactgggttctttaatcatttcatctgatgcttccttgccatatgcacgtccgtaggtggggtagtacttccacataagccagtactgaccatcatagaaggcggtcttcctcctggtgaacacaacaggttctttttctttccggtagagagtagcgagaccctctgcaactctgtctacggtaccgtccaaagccgggacagcatcatcagcaaacactctccaattgtcgccgtctttccaaaccaccagttccatttacttgtcctcttcattactgtgaatagaagtttcactctagcagttggtctaaactccagatgaccagcattgctctgaggtctgctggcagaagattcacgtcttctatcgcatccttatcagtcatacccatccaccaccatctgactccattcagcttgtagcaggtacacgctgctgcttcttttgggctgtaggccatcattgacgcagcttgcacaagctcaagcaatccgccgtacttgacgaacttccatgtatcgtcttctttgtagaaggcatagtgactcacttgcttgctccttcacttgatcttcaagtgctccggtacaccagtgactaccttcttgttggccaagtcgagcatggccttcttgtaaggggatccctgggtgctgatgtggtagccctgtgcatacacacggccacgcttgtcgtacttgtgcaggaggtagaaccgattgccttgctgaaccatgagcttatacatctcatgggactcagagacgaatctgtaccagtcgtctttcttgtcctgcgtatccaagtacttgtgggactcttcttctacggtgctcaagaactcagtgttcaggcacagctcaacagcgttcatcttgtccagcacatcgagacagatgtcttcgttgtgatggttgttgttcaggatcagggattccttctccagtgtgagatgaagcttcgacttgttcccagtgagcttggatggtttgcacaccataggaggaaggtacatagctcgctcaacagcatgttgaagcttctccggtagttgaatattagagatgaccttgtacgtaccgtacttgtacacctgctcaatgtcgtacacgtcaagctctgccagcactgcaaccatctcagcgatggtcttgatgctgtcagccttgtcgtcgaagccaagtacaccagctagcttggctgtgaagctgatgaacatgtccggtacctgacagtacgcagacgctacgatgatctcgaacacaatgtgctcaaggtccaggttacgaacagtctccatacgaaggttcttggagttgtagctgtactcagtggtgcgatactcctccagtagtgctattccccgctccatcagtgcaggaaggtcttcgtcaccgcgaatgaactcacggatgtacccgtcaatgtgcgcccgagcaaagcggtactcattggcgcgttgcatatcttcgggcagcatgtgggtaatggtcatggaacgattccttaatcgaacagaagtgattgggcacggatctctggcggtactagtttctctgcaacaggattgaagtcactgctgaagacgaaccacctgccattgtgcttggtatagagtttcttgaacggatcagtgtagctcttgagtctactcatcatcagaccactagctacattggaaaggtctttacggaatacctcttctgtcaaaccatcaaagatgtacagacaggactctcctttacgcagagagtcagatatcagcatcgtattgaacttgcgggccatgttttgctccgcttcccgtatgcccaccattgtaaacatgtccttgttatgcgcattgatcctcatcgccaactacctccattgcactagagtgaagccatcccattagggacggctccagatggttacgttgccggggagacgagccaagatgtccttgatcagccaccaaggctcgttctgtcccggctgctccaggtggtactggtgggttgggttctcctgtgcccgccacatcagctgagtggtgctggtgctgacgcaacccaggtcagtgggatcacggtagtgacgcttgtcctggaacacacctaccttggattggcagcggcacccgaagatgccaccagcccctccattctcggcgatgtactgccccacgctggtctgaataccagcatcgtggaagcgggctaccagttcagcagccataccagcagtcatgactactgccccggtggaggtgagggtgctgttgctcagcacgatgaagtgatcagccttgtcgaaggcttcccacatgttccctactacgaactgtggcattacaggagatcccccatgcggatgattccatcacagcagtcaggggactgcttggtcaggacgatgtggttgttgacgtggctgtactggaacatccagcggtgcccgtcatcttggtcgatgacggtcaactgcttgagcaggttcttcagcttcacttcacgcagtgcgtcaatgagagtgtctccgtccgaaacgaacatgccgttgtcgtcacggatcactacacgcttcaggtaggtgcgggtcatcattcatttccccaatacttcgtggttggtttgagccatggtttccatgcctcgctgaaatagcagttgtcgggtgcagcctgaaacagcggagctatgtcactgtcatggaagccagccagaccacagccaatgcgggtcacctggaagctcatgtagctgtgctccttggcgaagtccatgaaccgttgtacggccttggctacgtcactgatgtgacaggtgaccagcctcccaccgtgggccctgtacttggtgggcagggcataggacatgccagtcggcccttcccctacgcccatttctgcacccttgttgtttcgtgcatagagggcagcaccagcaccatggataccagcagtgttgctaccgaacacgaaaatcatgtgattggtttccatcagttgaatcctccgaacttgttgcgggggcctttgcccaggtgattggtttcatggttacgcacaggcatctcccacttggggcgacgcttggacttcttcactggcttgggaatctggtccagcatgtgggccatcacccgttcttccagtgcggtcatgtctatgtacaccatgtcgatcttcctgtcggaatacttgcgcacttccagtagcttgttcaggtagtcacggtccacgaccagacgcccagttacagtacccccggtgggtgttttgaggtcggttggcatatcggttctccagccggaaactgccgattccagacttttacttcatagtcagtaaaccagctgagtttcattggtttgatcggaacggatggctgggacagtctcttcaactgacccaaacctatactctaaaaaaccagcccacaccctactcaggatcgagttagggtgtgggcggacgcttttacaggtccagctgaagttcggacttgtcacgcacgacgcggaaggacaggatcaggcgcgagcgcaggttctcgatgcgcttggccagatccttgtcgtccttggcttcggccaggtactcgtgcagctgtgcttcgacggcttcgctcaggcgcagcggaatgccattgcccaggcgaaccggatcaccgccacgggtgccgatggagatgttgatgaagctggcagcacgggtgtcgtcggactgagcagcggtgttggtacgagcgttggatttcttgagtgccatgattcaggttccttgtaaggagaggtggtagatacagatcagaagtggttcggctcacatgagccatcacacaggcgtagcctgctcttgctcttacacccagcggggttcgtcggacaggtcgttgtcccagtcagcccagtggttcagcacgtcttcttcggtgaccgcagacataccaatggcatgcagttcacgagcaacgctctcagcgtccaggcattcacgatagccacggtcgaggatggaggtagctttgcgggtgatcagaacgatcatgatgaaattcctaagtaaacagtgagttgagatggtttggattaccaccccatggccgtaggccatgagtacttacagcagaccaaccaagttgaagaagatgcacactgccccgatcagggcgaacatcccggagaaggtcagtacgtgcatcacaaggatgtcgatcaccagacccatccaggtctgttgcatggtgtagttgttgctggaccacttcatgtagccgttcaggacggccacagacgaagcgatgtaaaggcatagcaggttgaggatctctacgtcagtcacagcagacctccagcgaggaagatgaagaggggaccacagcctgcgaacagcaggcccaggccacagacagccattacccatgcgtggattctccgcatctccaggtcatggcgtcgggagatactcagtggaaacctgagcatctcgttgatcacccattgcctgtgcaggccgatgaccagcatggacagacctacagcgaacagcaggaacatgatgaggatgatcacaggtaagcccccacgacgaagaagaggtaggcacacacccaggtagccactccgtacaggacggtagctaccgcagcggtaccacggttaccacgaccagtctcacaccgtacccaggtctccgcagcccatacgagcatgcggaggaaggacaacacagtgggaacgaccagcagcagtacggcgatgacggccaacagttgaacgatggtcatgatggactccttggttttactaggcgacgtggaagaggaagttgattgcagtgacccagacagctgcccagaacacgttccagacaagacctactacggcagctaccttctctgccccaggcagtacgaacagtgcaccgaagcaggtcagagaggccaggcacttgaccaggaacaggtagccacagaacacgatgagtacgatgcaagcgatagtgagcatgggttagatctccagggtaaagggtttggttttgagacggttggtacaggcaccaggaaggtctttgttgacctctgtccaatgccagtgcttgaggttgagccgacgacgctgaaggatcgcagtcttcaggctcttggcggtgtactcatcaccacacatgactacgtgggtgagtacagtgttcgggcagtccatgttgaacaaggtcatccgtacacggaagccagtcagctttccattggtagggatgatcttgatgtcgaagagacggccagtgagattaaggttggtgctcataggtgttccttttgatgaggtcgtagtaggcccaggcatagaactgaacccagttctcttctgagtcgtccaagcccactcgttccagtaagccgagtacagagtcagatccgcggaagtgcagtttctcccacaaccagttcttgaaggaccggtactcatcccaagtgattggagggccaactaccactccatttgccaggtcactcaggacgaaacacatgtaggtttcccctctgttggcttgttgccattccaggccaatcttgatcagttcagcaatggttctcatggatcagatcctcacgtcagcaaagccaatggggtcagcgggacagccacgctcattgcagaagtctgcgaaggcctggtccagcatgttccagacacgctggaactcttccagggattgtatgggactgaagccatgctggatcaacaggaacagacactggtcatactggaaatcccttgcccagcactggcacgcgatgtcataaacggtgatattacggacacgtttgatacgagcgtacttgtacatcatcagttgttctccttggtttcggtgaggtccagacgagcaatgaccacttccacatcctctgccccttcatggggaatgcggtagaagatgcggatgtccttgtcactgggactacagttgaaggtgatgaagtgtctggcttcaccgaaagtacgaacacggttggtttgatagttgacaccatcacgagtgaagcctacgaagcagacgtgttcctgcatcttatggtagagagtgttcatactagtaccttcccgttgtgatcgaagcgagcaaggactacctcacagccttctgtctcagacatgtaggagagacggatgcctgtgtcagttggcttgcagttgttgcggttgtagtcacgcatctcttccaggttgtggatggtaggagatgtgatgagttctccgttggtgaccatacgtacgaaacacttgttgacacggaacacgctatgcggattggacatcagaggaactccagtcagaagggatcaaaggtgattgcttcaccttgaggatcagtgaggtagatgccagaccagagtccttcctgacctctgcacatggcagttgccttgatacgagcaacttcatcagagacagcttcgaactcatgttcgatggagtggagacactcgttggtgtaaagcagggtgtagatgttctggtccatggttgatacctatagaggactatgaagtaagtacagaatcgaataccactccatcaccgaaggtgtagaggaacatcagacactacccaagtgtagataggaacacggtgtgtatcgtgtagatggaaaagtgatgacaaggtatagggttgagaaaggtagagagaagggtgaaagagatgaacattgagatgaacagtgaatgtagagttgatgatagtgaatgcactgcaccatgccctatctcccctatcctcctacacacgagagatgagttactgtcaggtgaagagttaacaagagagagagagtatcccttccttcctacaacctactgtccctgagagagaggtgtgtgatcttgatgtgtgttcttgatcttatgtgtgctttgaaaaggtaacctctactccgtacctggataggtaaagagtagaggtagagggttaagccttggccttggtacgttccttgcggacggattcgacagcttcggtgagacctttctcctgaagttcctgagcgttctcgatgttgagcaaagcgatggcttgttcgcgttgcagacgagccttgttgttgaagtgagcggactcttcttcagcccactcggttacgttctccgcagccttggtcaggttggtgacagcacggaacatggactccagcatagcgaagaattggttgagagctttgaacatggtagtactccagagtagtgagaatggttgtggtgacacaggatcaatccacagcacagccgaaggcttctcttgatctagaagtacagacagatgattgggtagaagtagagttaaacaaggtggggtaggtagcgcgggaattccaaaactctagaggtaccgggggggataaccggatttggagagccgcagactgaagtactgcatccatacttctatgatgaatttcccacaaacccaaatcacctcccttactccctaagccaatccctttccacctagctcccataacccatagctgaggttaagtcgccaagcaccgagcgcagcgaggtgagcaggatgactggtccgaagctatgggttatggatacctgtggatatctatagtcaagttatccacaggatatacacaccctagtctttaccttggatgtagcagcctatctctctccacgcatccttccagtccctgtgcttgactggtgatacgtaggctaagccagtctctgtgtgagtggctacaccagtgaacaagccagtagctgcaaaccaatagagttccagtctgtggtttcttgctcgatcactcatgaccagtacaccaagaccgccgctcattacagtaggtgtcttcacccaatcccttgcatcacgtaagacaggatcgaagtctgcatccatgaaggtactctccattctgagtgtcgtacctcggatggtacctacccagtagaacaagccatccttcttaacgatatcagcctgcttacgagaaccacgactggcaaccctgcacaggaaactctccctgttctcttcagtagaggtagccttaagcttgtcctccagttcttttaccttggcttccagttcagctatcttcttctctgctgggttgttaggtactacatcaaacagttcagcgtactcagccagcttgacgtaaaccaagccagtgttgtcatctcctgcattgttgatgtactcatgccaggagataccaaggtcgatctctaccagttcttgccctggtagtttgatgttcagtactgctttgttgttcattgagtctaagcctcgcgcgcgttgaggtgggggagtagggaagcctcgcgcctgcggcccgagtcaaccccgagcggagcgaggggttgacgagggtaattcctcgtggtacccttggtattactcacccacgggggattacctatatattatatagggagtagaaggaggctttagggcctcctttttttgtgcctggaatactaccgttggtcgggaagatgaccgatggttacacccggtgggtaccggaaggtaggggtagcctgcttcttcagacgggatacctccagttccagttcatggatcttgtgtttgaggatgtccgattccgaggaaggcatctggggacggatgctcaccgaagccagtacccattcgttcatgtacttggtcttctgcgcgtcggtcatggtgtcccattcatccctggtgagaagggcatcaaggtagtaagccttgccttggatggtgaggacaatgcgaatcttgcccgtgtcgtttagttccataaaagctccagtagcatcatggctccgtacaggttcatcggtaccatgggtgcgaagataaagaaggcgaagacaggcttctccttccattcgggtgagtacctggtcacgtctatcgccgtccacagcaggagggcgaagaggaagtgcaacaggtggaatagccagaggtgttcctcacttgctggcttgggtacgtacaaggaccagaccagagcgaagatcaggttggacacccagtctgctttcattggtttggccccgcagtgaagagtactcgtgagtgagtgacgttcagaacagagatgccagtccctctgcgtaccagattgaggatctgagctacagtggagtagaagtcatcctgcacttcactgagagagtaggggatctctaccttgtgagaggtagtcttcccgttcttcagcttcatctgtacatgtgcatagctgatgtccattacagcttaccttcctggagttggtggatgccgtagctgtagagaagctcagctactttctccgactgctcgtatcccttgttacggagcatcactgtcatctcttctacctgcaccagcttgagtacacgatcaaccgggcactctgcatagcagagatggttggggtctaccagggcatggaagaggtcgccgtcttcattgatactgtggactgcgatcagagggatgttccccttctcggtgtactggatgcacagacccatgacgatcacttggcttcctgcaccgagggccagttttcttccagtgtccgggttgtgagtgagggtgtccctcaaaaggaataccttggtgccacactccactcgtgcgttacgggacatgagttccccgttcacgatgtggcgggcatagggttctagttgcatggtttactccttggtttgtacgttgtgttatcctcggcacaacctatagacaaccgaggtactaagatgactaccacccccgccactactgctcagcctgggatgttgacggtagatgagttccgctctgtgctacctgacaagatgaagaagtccatctccccggaagtactgaagacactcaatgacatgctgtccgatcctgacatggcggaagccttcagggacaacatcattgggtacacccatgtgatgaaggaaggtaagttcaagctggacaactacctccatgcttcgaagtacgtgacctataagctgatggggttgaacaacaccgaggcttacacccgtaccttccccaccaagatccagcggtggacccaacagggtgtggccaacaaggacatggccagctacatcaccagctacaacaagtcgaagctggtgaacctcatcctggaacaggcactgatcccatgccatgtgctcaatgctgacatcaagcagaaggcgatcaaccatctgttccacctgatgcagaacgctcagtcggagaaggttcagcaggagtcggccaacagtctgctcactcacctgaagtcgccggagaagacggagctgaagatagatgtcagtgatcgtgcagcagatgccatcgacatcatgcggcaaaacgctgaagcactggcacgtctccagcaggagatgatcgcgggcaagcagctgtcggcgaaggatgtagctgaacgcagcatggacttcggtgaagtcatcgaaggggagcttgcctaatgaacttggacgccacaccaatagcgaaagctgttgcagatgaggtggacttcgctggcttggatgaagccgccaagtctgtagagcaatggcttcgtgaagtagtctatggggatgactcttcgtacatccccagcatctttgccttgcagttcgttgacttcatcaagatggtcaacggtaacgaaggggaagagaacaagacaccagtgcttcacctacggatgcttgaccagattggctctggccagactcggatcgccaacatggtgttccgtggtgcagccaagactaccgtgatgggtgagtacctgttcctgtacattgcactgtacggtgagcttcctggtttcggtaaggtagaccttgctctgtacgtgtcggactccatcgacaacggtgtgaagaacatgcgtaagaacctggagttccgctgggagaactccgagttcctgaagaagtacatccctcaaaccaacttcactgacatccgctggaagttcacgaacctggacgggaaggtcttcatcgtcaagggctacggtgccaagactggtgtccgtggtgcgaaggagatgggtaaacgtccccagcttgcggtactggatgacttggtttcggacgaagatgctcgctcgccaaccgtcatcgcagccatcgaagacacggtgtacaaggcagtggactacgcactgcacccgaagaagaacatgatcatctggtcgggtacaccgttcaacgcgaaggatccactgtacaaagcagtggagtctggtgcctggaaggtcaacgtctaccctgtgtgcgagagattcccgtgctcacgggaagagttcaggggtgcatgggctgaccgattcacctacgacttcgtgttgcagaagtacaccctggccaagaaggcagggaagatcgatacattcaaccaagagcttatgctccagatcatgtccgacgaagaccgtctcatccaggatggtgaggtggcttggtacatgcggcgcaacgtactggacaacaagaagcggtacaacttctacatcaccactgacttcgctacctctgcgaagaaggcgagtgacttcagtgtgatcagtgtctgggcttactcccacaacgaagactggctgtgggtggatggaatctgtgaacgccaagacatgggagcgaacctggatgatctcttccggttgtgtgccaagtggcgtccacttggagtaggcatcgaagtctccggacagcagggcgggtacatcccactgatacagcgggagatggtgaacaaggatgtctactttcacatggtttcggagaagggtagtagcactcctggcttgcgccctacgaccaacaagctggagcggttcatggccatggttcctcatttcaagcgagggaagatgttcttcccttacgacatgaagagcacacggtgcatggtagagttcgaagacgagattcgtttggcttcagccggtggcttcagatccaagcacgacgacttcctcgacaccatctctatgctggctttgatgaatccaatccctccaagccaagagatccgcatggagtacaatgacagcgagatgatctgggaagaagcgtctcaacgagagaacacctaccaagcaggggagagctacatcgtatgacaatccaactcaagcaggtcattgacctgctagcagagggggaactcagcaacatcaagtacgtgaacatcgacactggtgctctcgtactggagcgagttccttcgctgattcgtgcaatcaaccttggagtactggacctgcacaagaggttcctgctcaaggaaggtatgctgaagatccaactggaagaaggtcggaggttgtatcctctacgtcctgcataccaagtgggacagaagccaaagcctggagtaccccagttcatcactgatgggaacaagctgggcagacagtccatcctgaagatcgagaagatcatcggggacaatggagtggagtactacctcaacgatacctggcagccgctcaacatcactactcctgagttcgatgtactggagatcagtgaagagttctactgtcattcgtcgagcaagactctggaagtacggtaccgtcgtgcacctacaccgatgaagatctgtgtggacaacctggacagttggggttgcatcgatattgatttgccttatactcacctccaagctctgctgtactttgttgcttcacgttgccagactccgattggcttcatggagaacactgcacaagatgggttcaacttctcgcagaagtacgaagcagagtgtgcgaatctggacgcacagaacttgcgtatcgatccggtaggaaaccaggaccgattcacaaggggaggttgggtgtaagggtgaggggaccaggacggtcccctctttttttatgcctggatttccttgaagcggacagcgccgacttcagcggaccagccttcgatggaaccttcttcgttgacgaagatccattcgccggccttcacgtccagggtggcaccctcgttgaagttgctgagggagtagacacgttcgccatcagcgttgtcgccgaaggctgccgtgatgaaggggaacgagccgagcatctcttgcagtgcctggacgttctgctcgtggtcttcacttacctgccagcccttgaacttgaggggctgggcgtgttcgtactctttgatcagttgcatgggttattccccagtagagccgaagccgccgtcaccacgattggtttcggacagttcttcgacgagttgaagttcgggagtagctaccggaaccagaagcatctgaagcacacggttaccggcttcccagtggaatggttcgcggtcggtggagactacagctacccactccccacgatagtcggagtcgatcactccgcaggtgttacgcaggcgaagacctgctttacttcccgtacccgagcgaggcagcagcagggctacatgcccttccggtacagcagcagagaaacccagctttaccttggttggttggtttggataagccaccccaccctccggcatgaagatgtcataccctcctgcggtatcactggcacgcacgggcatggtaaagttcgggctcagttgtttaatttccaagattcttacctcattggtttgaaagagagtaactatggcagacgtggacgaagattacctgacccttcccaacgaggatggggatcccagtaagcgactccagcctgagtggagcaatgctccctcactggctcagctgaagcaagactaccaggaggcgaagcaggtcaccgacgagaagatcactcagatcaatcgttggctcgactacatgcacgtccgtggtgaaggaaagcctaagacagagaagggtaagtccgctgtgcaacctccgactattcggaagcaagcagagtggcgatactcgtctctgtctgaacctttcctatccagccccaacatcttcgaagtgaacccggtcacctgggaagatgctgagtctgcaaggcagaacggtctggtactgaaccagcagttcaataccaagctgaacaagcagcggttcatcgacgagtacgttcgtgctggtgtggacgaaggtactatcatcgtgaaggtaggttggaactaccagtcccgaacggtgaaagagcaggtagtcacctacgagatgatgccggacagttccgaggaactggctcagatctaccagaccgcagcacagatccgggaagagagtccttcggagtacccggagatccccgaggatgttcgtcttggtttggaagagacggaagccaacggtatccaggtacgggcagtgcctgttggttcggaagaagaagagcgggaagagacggtggaaaaccatcccactgcccaggtgtgtgactacaacaacatagtcatcgacccttcctgtggtagcgacttcagcaaggcgaagttcctcatcgaaaccttcgagagttcctacgctgaactgaaggctgatggccggtacaagaacctggacaagatccaggtggaaggtcagaaccttctatccgaaccggactacaccggaccttccgaaggtgtacgcaacttcgacttccaggacaagagccgtaagcgtctcgtggttcacgagtactggggctactacgacatccatggtgacggagtactgcatcccatcgtagctacatgggttggtgctgtgatgattcggatggaagagaaccccttccccgataagaagatcccatacgtggtggtcagctacatcccacggaagcgtgacctctacggtgagagcgatggtgctctgctcatcgacaaccagcggatcatcggtgctgtcacccgagggatgatcgacactatggctcgttcggccaatggccaagtcggtgtgatgaaaggtgcacttgacgtaaccaaccgtcgccgcttcgaccggggtgagaactacgagttcaacccaggtgcagatccacgggctgctgtgcacatgcacaccttcccagagatcccgcagtccgctcagtacatgatcaacctgcaacaagcagaagctgaatccatgactggcgtgaaggctttcaacgctggcatctctggtgctgcactcggtgacaccgctactgctgtacgtggtgcattggatgctgcatcgaagcgtgagcttggaatccttcgccgtctctcggctggcatcatcgagatcgggcggaagatcatcgccatgaacgctgagttcctggacgatgtggaagtggtacggatcaccaatgagcacttcgtggatatccgcagggatgaccttgctggtaacttcgacctcaagctggacatctccactgctgaagaggacaacgccaaggtcaatgacctgaccttcatgctgcaaaccatgggaccgaacatggacccgatgctggctcagcagataatgggtcagatcatggaactgaagaagatgccggacttcgccaagcgtatccgtgagttccagcctcagcctgatcccattgcacagcagaaggcacagcttgaactcatgctgctccaggcacagatcgaagctgaacgtgcacgcgctgctaactacatgtctggtgctggcttgcaggattcgaaggttggtactgaacaagccaaggctcgtgctcttgctagccaggctgacatgaccgatctgaacttcctggaacaggagtccggtgtacagcaggcacgcaagcgtgaactgcaacaggcacagtctgaagcacagggtaagttggccatgctgaacagccaactgaagcgactcgatgaagctacttcagcaaggacttcccaaaagtagttaacttcactatagttggttcacctttacggtgaaccaacacccctttacttgacaggatttgcaaagatgaacgaagaacacgctattcagatcacccggaagaacgctgagaagttcgtccggctgcgtgacgcaatgctgcgtttgcacaagaaccgggacttccaggcgctgatcctcaatgacttcctcaaggacaacgctgcacgtctggtcctgctcaaggcggacaagaacatggaatccccggagatgcaggcacgcatcatccgcgagatcgatgcggtaggtgctctgcacacctacttccaactgatcggcgtacgtggtgacgaagctgaacaggccatcaaggactgtgacgctgaactcgaacgtgtacgcgaagaggaggatgaagagtaatggctgacttcctcgaaatgagtgacgacgatctgcccgagttctacgaagtagaagagcagactcgctccgatcaagaagaacccgaacaggaacaacagaacgacgagcagtcggaagaagttgttcaggaagaagaacctgctgacgaagagcaggaagaagaacaggaggaggaacaagatcctctcaactcgccggacgatgaactcggcgatcttcctgtagaagagaaaccgacggaagaagagtcggagcaggaagaagaagaagaagacggcgacaaggaagagtcggaagaaactccgactgaagaaaaacctgaagccaagaagtccgaggctaccaagcaagaggtagatcctgctgacttcatggcgaagatcactgcaccattcaaagcgaatggccgtgatctccaggtcaagacgccggaagaggctatccgtctgatgcagatgggtgctaactacaaccacaagatgtccgcgctcaagccgaacctgcacatgatgcgtcagttggatgatgctggtttgctgaacccggatactatcgccaatgtggtcgatcttctcaaacacaagaaacctgaagccatcgctaagttggctaaagatgccggtgtagatccgctagacttggatgagaagagtgttgcggattacaaaccgactgctgtaccattcaaccaagttcgtgaggcactggacgaacaactcgattccatcgagcatagtccatcctacaaccgagtggttactacgctgggtaagttggataaaacttctcagaagttggtttccgaacatcctcaagtcatcggctacttcgaacagcacatgaccaatggggtattcgaccgaatcgactccgagatccagcgccgtaaggcattcggcacgatcactgatagtaccccgtacctgcacgcatataaggcggttggggatgagcttcaggctcaaggtgcattcgacgatttggctcaagcctcggccactgaaagccaacgtaaagcacccgctgaaccggtgaagcgagtcaccacccgcaccaaggcacaggaagcggctgtgaaagaaaaacgtcgggctgctgctccgaccaaaactgtagctggaaaggctaagcctgcccagttcgatcccctagcgatgtcggacgaagagttcgagaagctgggcttcaactaagcaatccctgaaactggaataaggaaaacatctcatggccggtcctgtagataacatcaagccgatgaagtacaacgaccccgcgaacggggtagagtcttccatcggtccccagatccatacccgctactggtacaagcgcgcgctcatcgacgccgccaaggaagcgtacttcggtcagctggccgataccttctcgatgccgaagcactacggcaaagagatcgtgcgactgcactacatcccgctgctcgacgaccgcaacgtgaacgaccagggcatcgacgcttccggcgctaccatcgccaacggcaacctctacggttcgagccgtgacgtgggcaacatcactgcgaaaatgccgaccctcaccgaaatcggcggtcgtgtgaaccgtgttggtttcaagcgtgtcgagatcaagggcaagctggagaagtacggcttcttccgcgagtacacccaagagcaactcgacttcgacagcgatccggcgatggaaggtcacgtcaccaccgaaatggtgaagggcgcgaacgagatcaccgaagacctgctacagatcgacctgctcaactcggctggcaccgtccgttatccgggcgctgcaacctccgacgctgaagtcgatgcttccaccgaggtcacctatgactcgctgatgcgtctgcgtctggacctggacaacgcgcgtgctccgaccaagatcaagatgatcaccggtacccgcatgatcgacacccgtaccgtgggcaacgcccgtgctctgtacgttggttccgatctggttccgaccatcgaagccatgaaggacaaccacggcaatccggccttcatccccatcgagaagtacgctgccggtggtgccaccatgcatggtgaagtcggtcagctgggccgcttccgtgtcatcgtcaacccgcagatgatgcactgggccggcgtcggcaaggctgtcgatccgaacgaccaggttccgatgcatgagtccggcggtaagtacagcgtcttcccgatgctgtgcgtggcttccgaggcgttcaccactgtcggtttcgctaccgatggcaagaacgtcaagttcaagatcatcaccaagcgtcctggcgaagccactgccgaccgcagtgacccgtacggcgagatgggcttcatgtccatcaagtggtactacggcttcatggtgttccgccccgagtggatcgccctgctgaagaccgtggcacgcctgtaactaggcatgggggagggtaacctccccctcttaactcttaccctggagaatcacccatgtccctcgacgaactgcaaaacctgagtgaagcaccgctggaatccccggatacccgttccgagttggaagtcctgcaagaaaaagctactgcccttggcatctccttccgctccaataccggcgtggaaaagctgcgtgaaaagatcaatgccgtcctgaacgacgaagctgtcggcgacgaggaagaagacgaagccaccgaagctacctcgtccatcccgaagccgtccgccgaagctggtgcagctgccctcaaggccgccgaagcaccgcgtccgaagaccgagggtgaactgcgtcgtgatcgccggctggctgcgcatcgtctgatccgctgccgcatcacctgccacaacccgaacaagaacgactgggatgccgagtacttcagcatcggcaacgacgagatcggtacgatccgccgtctggttccgtacgaggtggactggcatgtgccggaagccctgctgaacttcatcaaatccaagcagtaccagcacttctacacggttaccgagcagaccccgatgggtccgcagaaggtacgccggtcgaagtcggtacgtgaattctccgtggagatcctgccgcagctgagcgaggatgaactcgaatccctccgcaagcagcaggcagtaaacggttcctacaaggaggactaagccatggccgtagagccaattaccattgccgacctcactgaggtcaagctagacggtaagggtgctctcgaccaactcctgcaagtcacccgcctgcatctggccaaagagcacgatgcagggcggttgaaggggcaggagtacgcagctgttctcactggtggcatcacggctgttcttcagaacgccgtgatgtttttgcttcagaaggatgaagccgccaacaaggctgcactggtcgaagcacagatcaagctcaccgagaagcaaggtgagttgctggacaagcagatcgcacaagctgacaaagacgctgagcttatcgctgccaaggtcaaactgaccctggaacaagcgaagctgccggattctcagattcgttctgctggcttccaggatcttctggttcaggaacagaccaaggtacagactgcacagactcgtcggatcgaccaagagatcctgtctgctggtttccaagacctgcttgtgaaagagcagactgcgaagaccaagcaagacgtactgactgctgtccaacagaccaaggtcatggaacagcaggtactggagtccactcagaaagtcctgaacatgaagcaggaactcttgaacctcgtggctcaggaatgcttgctgaaggctcagttcgatctgaccaaggaccaaggtctgaacacccaggagcagaccattctggtacgccagaaggtagcttccgaacgtgcccaaaccatcggtgctggtgtggatgccgactctgtgatcggtcgccagaaggagttgtacaaggctcaggctgatggcttcaagcgtgacgctgagcagaaggctgccaagatcctgatcgatacctggaacgtacgccgtaccactgataccggtactcaagccaacaccaccaaccggctggacgatgccaacgtcgggcgggtagtgaacatgctgatgactggtgtcggtgcctaaacagcgtgctgtacactaaggggaacttcggttcccctttttttattggaggacagcatgggtctgttcagtagcaagaagaagactgtggtgaacactacagtgcaacgagtgttcgatgatgcacacatcccggactctcctcgtactggtgtgatccaggggatcactcacgagactgggatcgtcgagaacatcctagagaagctgtccgactccattggagtacgggcgaatactgcctacctgtgggcacagcggaacaactactactggggcttgccagagtccaaggtagtgaatggtgtggatgctcgtactgtagtggttcaaaccatcgcacgaagcgaaggtacgatcaccacctactacaaccagttcggtccgctgaactccctgcactggggattcactgaattggtgcggctgtaccagtacaacccactgaccaatgaactgcctggactcagcaccacgaagggttcgaaggtctacctgttcgacatgatccctgtcttccagaccgacactgtggcatgggcagacgagacagcgaacaagggcatgcttcaggattttggtttcagtccgaagtctgggtacacgccaagccgtccgtacaacaccattgggggaatgggtcagttcgccgggtggtcaccctatcggacagacaactctttcggtgaggactacgttctactgacctacgaatggaaggatgcccagggggtcatcaagcaggaaaccattcgcatgatcatgaacctggacctgtccctggattaccatcaggttcggttccgtaggcagaatggaacccagggattcttcacctaccaggacggcaagggaacctatccgctaatcgatggagtgtttaacctcgactacaccaagcagggtacctactacccgtggatgtactgccgcttcaacaagatgaacgtgaaggacatcccaggcaatgcctacagggatgtgaaggaagtggccaagatctctggcattgggatcgacgagcttatcgatggggttcatgctgaccctgacatcggtgacgtggctcaggtagtactgttctacggtgtgccaccaggtgccacgaaccaggaccagctgacctatatcttcgagtacctgttgctgctccactcggaggcattggctcagatccagaaggcagagaacctccagggcaagctaggggattactccaacacggctgaccagatgatcaccatgcgggacaagtacttcaagatggacttctccttcagcggtatcacggtaaaccgtaagtccgggaaggttggtcctattggtttcatcaatgtgaagtctggtatggccgacaagtcctctggacagatcaagacccagcagccggcgtatacctacacccgtcaggccatggactccatgtacgacgaggtgatcatctacaacccggcaatgcactaccagatcaccagcaagaaagggcacgtagcccaactgggtcaacctgaactgctgatccctgtggaccgagtagtactcagtcagcttggcttgagggcacaggaacaactcctgtgccgtagcctgcacatggcgatcaacacccaggtacagatcaagaccccttggtatgccagtggcttcttcaaggtgatcctgattgtggtgtctgtggcagtcaccatcttcacagctggtagtgcctggggaaccatcgtcgcagcagcctccctcggagtggctgctctgaccatggtgatcgtacagatgatcgttactaccctggccgtcagctacggtgtgaagctgtttgtccgtgctgttgggcctgagttgggtatcctggctgcggtagctgccctggctgttggtgcctacgggatgtccaataacgctacctggagcgagaacctcatggcagtgagccatggtatcgccaaggaatcgcagaccatggaacaagctggtctgatggatactttgaaggaactggaacggaaccagacgtactacgctgaccaactccagagtctggaagaccaacgtcgtgaacttggtttggttcagttccaagcacttcagggtgaagacttcgtgaaccgtccgctgactatcctgggtgaaagtactgatgacttcttctccagaactgtacatgcggggaacattggggctgcaagcttccaactgacggaatacttcgtagatgctaagctacagcttccttccataaacgaaaccatagaggaaatcaacaatggcctatccgtacagtgatatgcctttcggagtcgagctggacacttccactctcggttcctttggcttgggtggtccccaaactcaactacagatgcagatgcctgctgtagacgtgaacgctgctgcctctggtagtggtggtttcatgtctggcttcagcaacatcttcagccgtgattccatgttcggtggtgtagctccgagcggtgctcaaaccggtggctgggtgatgcctgccctgggcattggccaagctgtcttcggtgccattggtgccaaccgacagcagcgtgctgcacgggatcagctggcagagtctcgccgtcagttcgacatgaactatggtgctcaacgccagtcgatcaataccaacctggaagaccggcagcgtgcccgagtggcatccaaccccacggcctatgagtctgtggattcctacatggaacggaaccggattcgctaatggcccaagagatcacttggcgtaacattggtgcaacggtaagtcctggcagtgcatcttcgatgtctgctgggactaccggtgtccaacaagcacttggtgcactgggtgacatcatctcccgtcaacaggagatgaatgtcaacaatgccaagttgcagcgtgaagccaacacgcaaagctatctggaccaggtggcagcatccaccctggaacaactcagcaacgcagactatcgcagtggactggaggcccaacgtgatgcgatggggatgaacctggatcgtgctgctactcgtgatgcgatcaccaagcagatcagtgctcagcagaaccaagcggctgctactcagaagttcgacgacatgcaggctgaggtaggtcaacgaggcatcgtagatcagcttcgtaccctggcagctgaaggccgtgctggtgaagtcaaccagatcttggctgagcaacagctgatcaacgagggcgagatccgcaaggaactcactggtgtgcaagatgctatccagaatcggcagtaccgggcagctggtgaacagcgtgcacaggcagcggccaaccgggcagctgaagcacactccctctccatggctgctggtcgggagaacctggctttcactcgtgagcagcgtgatgaactacgccgtgatcgggatgaagcgaagctggtttcgggaaccatcgctactaccttccaggactacgacgagtcccgccaggctcagagcgagatcatgcggatcgtgggcaaggaagtcggtatgcctaccgatgaccagggcatgcccgacatgagccgtgcttcgcaagaccagcttgatgccttcagcaatgcgctgaacgaagctggtgtacaagccaatacctctcctaccgagcggcggaatgctgcactcaagtctctcgtggatgcaggggtaagctcgaagggtatcgcccaggccaagcaagagatggaactccgggaatccctggagggtatggctccgcaagatcgcacgaaggttgaagcaaccatcggtgcggttaacgcagaactggataccctgcaacggacggctaccgaggactacgaacgggaagttgcacgtaacccgtttgtcgagcctgacaaggatccgctgggttcggtcaacaagatcgtagacaaggctgtgaagtctggtttcggctgggaaggtgaccgccaggatctgaacaacatgctcgtggacttcgccaccaatggcatcaagctgccggacggacgtactgctgtagtcccgtcgaagctactggagcaggcgttcaacaccacgaacacttggctgttcaagaatgccggtgacgtggagaaacggatcatcgaactcatgaccactgatggcatgactaagatgcgagaagacgctccgaccattcgggaaaacttcctgaaaaccgtgtcggacatcgccaaccaaaaacggtcaaatgccgttaaggtaactcgctcgtcagaacgggaaaagggtgttaccatggacccaaccgatgatctaacttttgcactacgagggaggaaacgatagatggctgatttcgacttggatcaattcctgtcggatcgtcaagaggcgaatgccggggctaccccggcattcgacgctctggactttgccagtgcgggcctggacatgaagggttcgcagaaggcttacgacctcgacggcatccgcgagcgcaagaagcgcaacgtggaagaatccctcatcggcaagatgggtatcacccccggtgctgctggcactgagatcctcaacactgctgcttccttcgtatccggtactggccgtgctctaggcgacgtgattgctctgccgatcaacgctgctgctgacatgggccaggctggtgtaaccaacgaagccatcgaagcctacaaccgctacgtctccgcccagatgcaggaaggtgatgaagccatcctgagccagactgctgccggtgacgacggtgttccccagaccatgctgcaacgtatgcaaggtgtggatgaactccgcaagttttctacaaacgtggacaagttcttcgactggtcgagcatcgtagacactactcgccgtgaccaactgagcgacgacatcgctgatgcgactgctggtggcgtagaacgtctccgcaatgcaggcgagtccttcagccgtggcgagattctggatggcttggtacaaggtgcactcggtgtcggccagaccgctgctaccgctatcggtgcatcggcaaccaacccgctggcagtcggcgagtacactgtggaaaacgctccgcagattctggcctatgccgctaaccctgtgctgggtgctgctaccaccgtgggctacgcctcggatgaataccgtgaaggcatcaccgagtatcaggccgagaaccaaggccaactgccggatgctgacgatcgtctgaagatgggtcttgctgctgcttcactggcggtagctgagcaggtagccaattctggcatcctgcgtggtatccgtggtgaaggtggtggtttgatccgctctactcttggttccagtgctcgtgaaggcgtgaccgagggttaccagacctggggtgagaacgttgctcacctgaaagacaccagtctggaagagatcgtcgaagccgcaaccattggtgctgctgtcggcggaaccatgaacatcggtggccgtgctgctgtaggtgcccgctctggtgctacccgtgctgaggctgctttggcttcgcgtgaagctgtgaatgctgcccgtgaatccggcgacatctctgccctgaccgatgtgacctcggagtcttataaccctgctggtgcagtggtagttctccaggaacaagtcatggctgatggtgtgacccaagaggtcaaggaccgtgccctggagcaggctgacaccatcgagcaggaagctgcccagcgtgtatcccagctggagcaggaacaagtcctgttcagtgaagaaggtctggccaaggtagagcaagccatcgaacaacgtgagcaggccaagcaaggtgctgatgaagctaccgttgcccgcctggatgaagaactggccaacctgagcggcgtgcgtgagcagatccgcaacatcactcctgagcagcgtcaggctcaagccaaggaactgaaggatgcccagcaagtactgaccgctactcgtgacgccatcaagcgtttccaggtggaagccgctccgaaggctgccgaggtagagactctggttcaggaagctgctgtccagccggaagcctccgagcgtctggtcaccctgaccatgatcaacccggatgccctaagcctggagcaggtagatgctctggtggctgacaccagcaacacccttaccgctgagcagcgtgcattcctgcgtagcttcagcgaagcacaggttgcactcaacgaactcaagggtctgagcggtgtacgcactgacatcgagtctggtggtgatggcttcaaaggtctgcctcagtaccgcaacgctgtgcgtatggctctgatgaacggcaacgaagaagcggctgctggtcaggtagaccaactgcgttccttcgctgacagtcgtgtggcgaagttcaatgccatcgacgctgcgtatcagcaggtcaagggtaccgacaactccatccgtatcgtacgtgatgaagctggcaactggaccgaagcaccggagtccatgactgcccgccaactgaagtcggctggtggtctggagatctccgctcgctccttcaagctgcgtgatgctgtagcactggaagccactgcactgtctcgctcggctgagtccctgggtgaactggtcaaggctggtccgattgctcgtccggcccctgtggtgcaagaagctgcccccgcacaggaagcgcccgtacaggtagctgaagaggtggccccggtagaggcgcctatcgctcaggtcactgaagatgtcccagtcagtgaaaccgagtcgatccaggcagaacctgctaccgaggccgaaactggtgaactcacggctatccgtgagggtgaagctgtgcgtggccaggaagttgctgctgagaactaccagactaccaatctggtttctgctttcttccagcaatccccggcacgtaacgacggtgacactcagaagcctctggtagcagtcaaagacttcgctaccaagatccgtactggtgaaggccgcatggctgaattcgctggtgtgaagagcttcactggtcagcaacagtctgccatcaagcagttcatgaagttccaacgtgctgccaagccgatcatcgagcgtacgctgaagccatacacctcgaagaccagtgacgccagccgttactacttccgggactatgctcagttcctggtgaatgctgacggtactctggacgagaacctgaccaccgccattgcctacggtgcgtacgactgggctatcgatgcttccaacaacctggtgaacaccgatgccggtatcaatgccatcctgggcaaggactccgatgatgaagtctctcctgctgcctatgcagtccttggcaacgtaggtactcgccaggccaccgcagcttcccagctgggtgccaagatcgttgatgtccttggtttggaagtcctgccgaatgctcctgttaacgagcgtgctcgtctggaagcttccctgggtgagcatgccttggctctgctggtgaagatgggtgtggcaaagatcaccactgtcagcgacgccaagctgaagtccctgatggactccaatgaaccggccaacccccgcgtcaagcactacttcctgaccccggtcagtgagcgtgtagacggtaagctggttccgggtgcagttgctcgccagatccgtgaagccaataccggaagccagtccatcctggccaagctgttcggttcgactgaaggccagactgaaccgagcttcactccggttcccttcacccagaagaacgccaagcgtactcagcagccggtacccaaggaactggccaagatcctggacgatgcaggcaagcgtcccatgcgtctccgtcaggacatgttccaagtctggggcaacctgtccgagaacgcattggccaccatcgctggtgctgtagatgttgaaggtggtttcgtacacaaggccaaccgtgctggcacccaagccaagaacgatggactggtacgccagatcgacaacttcaacgagttcttcggtcggatccaggaggtttctgaccttggcttggaacagccgctgtacttcgaccggagcgtgtggaagcctcagcgtgttggcttgactgccaacatgatcaacccgcagaccagcaaggtgcatcgccacatgctggcaatggaaggctgggagaacaccatcaacctgtccaacaaggcagagatggatagcttcaagctgcgtgtactggagtccttcggtgtgaagactgagggcaacaacacttcgaaagtgctggccaagtacgacagtaaggtgaacacgccggcaatccaggccggtgtatctgccctggctgagatcctccgtggcgaggcccaagacactgtggccaacgagtctgcaatcctggcagccgtagccgaagctggtgagaagttcttcagcttggatggcttggtagcactggctcaagagaagattgcccgtgagaacggtgctgagtccttcactacccagctgctcggcgaagtggacggtgtgaccaacggtcctatgctgtccctgctgatgtccggtgccaagggctttgacaccctgaaccagggtggtttcttcagcctggaagatccgtacacccagttcaacgactacaaggcacagggcaacctggacctgtacgagggcaccatcaaggctgtgctggaccgtctgggcaatgaaccgctgctgtcctctgtggaagtcatcactggtgtgctgaccaacgaggaaggcggtgtatcgtccaagggccgtaacgtcatcaagaagcccctgaccgcaatgatgtttggttccaacaccaagactgctgtcagcggcatggctgatgccttcatcgaaaccatctactccaagatggaagacgctgccaatgctggtgaccaagctgccctgtccaaggtgatcgctgccgtgaacagcctcatcggttcgaagaacagagacaagcgtcagctgtgggctaccgacatgggcttcgagcaagcactgaatactgtctactccccggtccagcagaccgccatcaaggctgccttctatgacctgctgggtagcaaggtagagagtgcactgaacgatacctacgaggtcttcatcgctcgccgtgacaccatcaacaagactgcgaacatggctttccagatgtacgaagctgtcttccaggctcgccgtgatgagctactggcttcggccaacctgcctcgtggcaatgatggccagccctttactgacctcactcgtgctcagatcgaccagatccgcaacgagttgaaggacatggaaccgatcctgcacaccgctttctcgaaagctagtggtgacctggattcggggatgctgatggcgaagactcgtcgtgaactgaacgactctcccctgtaccgctcggaagtccacttcgctgaacctctggagttcaccgatgaggaaggccgtaagcaatccgtgaagagcttccgtgccagtggcatgaccaccgtcaacgaaggtccgggtgtagctccgttcatcactgctacccacgcaggtgactcgttcatctcccacaatgcactgatgggagaagatgtcctgaacatccacgatgctcatggtgtaggtgtactgggcatggacgctgctggccaacgcctgaacgaacaaaccttcaagctgatgctgaactactcggcagccagtgagatggtttcgaccttcgagcgtactcttgctggcttcagcaagtgggtacaggatccgcaggttgcaaaccagttcggcaagtacctggaaagccagaagactaccgtctccactcagctggccagcatccgtcacgtcgctgaacaggctgacactgacaagctgaacatgctggccaacatgcgtgcagtaggtcagtacgccactgatggcggtagctacatcgtcaccgatgctgaccgtgctgctgctgtgaaggctcgtgaagagatcggtagtaccttcaatcctgaagcggagacgatggctgatgctatcgatgctcagctgaaggctactcctcgtgaagccaagcctgctgctcgcaagcctctgcgcaatgactcggtacagtccctggctccggctactacgctgaacaccatggaccgcatcaaggctgaaggtcagctgcaacaggacatccagcaggtagcccaggtgatggagaaatccaacctgagcttggagtctgcaaaggaagtcctgccggaagagcgtgctgctgaggtggtccaagccgttcaacagaacagccgtgacaagacctcggtatggggtgaactgggccagccgataactccgtctgaccaagcactggtggatctgctgaccgaaaccaatgacctgaccactcgtggtctggctgaggctctggtagcccgcgccaacgatcctttccgcaagcaggtgctgcgtgctgctcttcggtccatccgtgaagatgtaccggtcaagctgatcacctctaccactggccctgacggtgccatcggtgagggtgtgagcaaggctcgtggctggtatgcaacccgtggcaacttcgaggctctctacgtgaagagtcccgagttcgttgagtccggcatcactgaagagatgctgacccatgaactgctgcacgtgagcctgggtcgtaccatccagcgcgaactggacaagaaacaagccaatgccaactacgactctgctacttggcgtatggtcaatgacctggagatgatccgtgctcgcgccagtgacatgctgagcaagaacggtggtctgtctgccaagtacgccaacgctgtgtcgaacgtgcatgagcttgtcagctggggcatgacaaaccaaggcttccaggaagaagtcctgaagaagctggagatgcctgctggtaagcgtgatgctggtttcactgatggcttgctgcggttcattcgtaacctgactgccctgctgttccgtgacaccaagccgtccgataccaatgccatggctttggtgatcagcaatacctctggcttgttcgccgaggctgctgcacagatggccaagcgtagcgacctgaccctgaagtacgaggacgctgtagatcaggtcaatgccatgagcagtgagcagatcttcaatgccctggaaagcgagaagaccccgcttaccgaggctcacagcaacaagctgaagtctgtcctgaacagcatcgtcaccgagctttacggacccatgggtgcattccgcaacgaggttgctcgtggccaagcactgaccaccactgatgctgtcctgaaggctctggacactggccgcctgcccttcgcctctcaggcattggcttcggcgttcattgtcagcccgcaggaagcctacgtgctggagcaggttgaggctactgtggccaccactctgaacagcaacgatggaatcttcatccgcagcagcctggagaacctctggcgtgaagccaaggatcgcctgactgcgaaggacttcttcgctggtgagtgggaccaagccactcaagcagagaaggatgtggcacaggagaagtacaacttcctgttccgtcctgagcgtgtgggttcccgtagtgactacctgagccgctttgctgccctgggtgtagcgagccaggaagtagcgaacctgcttcagttcactacccgtagcagcgagaagtccttggctggtatgccactggctactcgtctggttgagatgttccgccgtctgcttacccgcctgggtcagctgcacgacaagactcgtccgggtgaggtggctgagagccgcctgttcactctggtggatcgtctggtggacatcgaagccaagcgtcgtggccgtctggctgaccagaaagtgggtgccctggaccaggtggaaactgccctggcgaacactggtgaagccatcaaagacaacctgaaccggatcgctgaatcgaccttcttcactcagtcgagcagtccctttgttcgggtagctggcaagaccatcagcaccatcaccaatgagcgtgttggcttggtcctggacggtatcactcgcatccgtgacaacgctttcaagagccagcacggcatggccatgcaggtagtgaacgagatgcgtggggcacacgagggtaacctcgctgcacacactctgttcaagcaagccaagtccaacgagatggctcgtaagcaacacatcgagtacaccgctgcgatgatcaacgaaggcttcaaggacaacggtcagtacctgagtactgaagaccgtgctgccctgaccaaaggtttcctacgtaccaacatgggtaacctgcgtgaagccctgggtatggatcggttgaaggaagtccttctggacaatggcgaattcgccaatctccgcaaagacctcgaagaccaactgctggcattgccgaatggtcagtatttcctgggtgctgtgaaggatctggcttaccaccgtgtgattggtggcaacgtcagtccgaacctgatgctgaacagtgcgaacatcgctgacatgctgggtaccaagcgtgtgctccagtcctccaaggcagaccgtgcgaaagccatcgaactgctggaccagctgcaagctgtctatgggtgggagtactctggttcgcaggtaaagtctcgtgctcgtgagatcctgaagaccgaatccaaccgtaccgagggtaatggtgtggacctgatcctggccatgcatcatggcttgggcaagcgttccaaggatgccctgttccaaggcaccgaacgcctgtacaccgatggctacgtaccggacatcttcgactccaagatcgaagtgctggctgtggaccgcagtgatctgccctacttccagaagcgtggttacgctgttgctggtgatgtgcaggtagaccaacgtgctggcctggaatccgacaaggttctggtgacccgccgtggtagtggtcaggttggtttgctgactggtgcaatgagctacaccggtgtgcatgctcgtggtaccaaagtggatcgtcaggctaccaacatgctgtcgtctggtcctggtactgcgaagaacactgttactgccatcaagcgcaacattgcacaggatgtgaatgacatgttcctgcgtgatcgttcctatgatccgcgtcagcagaagtctggtcgtgtgtctcctgtggtaaacccgaacggagccatcgtggactatcgctacaccatgactgaacacaaccgtgacagtctgctggaccgcgataactctatggaacaggtgctgggtacccttgcagggcagatcgtggacaaggttgactccgcaatccagaacgcagatgttgtgcgtgctatgtacgaccaattccgcgaggattacgccaaccgtcctagcagctacttggtagtaggcaaggacagcactgatccgcaactgcttgagttgtaccaactgctgccggagagcactaaacgtgagatccgtaagacttggggtagcgacaacatgcagatccctgctgatcagctgaacatgatcatgggttatcgcaagtacagtctgactactccgtttggtttggcagaagacgaacgcaacatcgctgagaaggtgcttgtacgagttgctgaagccatcctgggtgagaaggctgcacttcgcattggtcgtgctgaggatgtgatgcaggaactggtccgtgaagccaaggacatcctggtaatcaagaacatcaccactctcgtaggcaatattgtctcgaacatgactctgttggcttgggaaggtgttggcttggctgagggtgtgcgtgctcacgctaccggtatcaaggctgctctccagtatcgtcaggacaataagaagcttatccagcttcaacgtgccctggatgttggttacctgccttccggtgagcaagctgtacgcgatgagatcgctgtgctgatggatcgcctgaatcgcaacccgatcaagccgctggtagatgctggactgatgcccaccatcgtagaagatgtggaagctgatgactcgcagtacagctacaagtctttgctccagaagaagactgagaagtacaccagcaagctgccgaagttggttcgggacattggtcgtcaggtctacatgactcacgacactgctgtgtacaagttcctgagccaaaccactcagctgagtgatctggttgctcgttacgctctgtatgagcacctgactactcgtgcgaaggatccgctgagtaaagctgatgcactgcgtcaggctgaagaatcgttcatcaactacgacttgccttctggccgtggtcttcagttcatgaacgacatgggtctggtgatgttcaccaagtactatctgcgtgtgcagaaggtgatcgctcgcttgatccgtcagaagcctgctcgtgcgctggctctggttgctgtcaactactttgtgagtggcttgcagtcggtaatggatagctcttggatcaaccggattgggcacaacccgttccagtctggtccgtggtcctggccatccagcttgagtgaactaccaggtatcaaaggtctgatgaacctgtaatgaagaaagggggagctattgctccccctccttcttcctgctgaagcaatacttcaaccattcccatcctacccagcagaggatgagtagcacgatgaacagtgctactaccacgccgagtattctgaatatccagctgaatacgaagccaatgaacagaatgccaatcacggctcctgctagtgctccagcgccgaacaatcctttcaggactcccatacggactccttacttcttgtcgaggaaggccatacctttctgcacaacttcttgtgccagggcaggatcttgtaccgcagccgcataggacatgaggtactggatgtggatgttctcacccttctcgccgagtgctgcacgagtcatcacaccgttcggcagactggcagaccagtacagcgggatgctgtgctcgttggccagacgcagtgcttcatccaggagagccttcaggctcggagggatgtccgactcgtagttgctgccacgaaggctgtgctgtacgccctggcgcttggcttctactaccgcatctaccaagctcattcggccgccttcttgatctcgttgatgttctcgttacctaccgcacgtaaagcgcggaggaagcggtcggtttcctgcttcagggcagcgtcgaacatctccagggtagccataccgtcgtcggtggcattgtcccgtaaggtgttcgtcagcttgttgcgcatttcgatgaggtgtagcacacgtgtgacgtgcatgtttttcagcatgcacgctttgctcaaatcgcccatggcgaagttccttctggttgggtgtaagggatggagtgctctggtctggaccccattgcggggtggtgggtgtacccgttgcaacgggccagagcactcccttatgcctactggttcaatagacataagaaagccagctgggggtagctggcttggtctacagaggcatcagttaagggaggtggtaaacggccccttggatctagggggacaagggggacttggtagtggtatccaggggccgatgaggtggtaagaggttgtctccacttcatggttctcaacttacaggaggctgacatggcagtcaacactaaaaagagtccgcctacccgtaaccattacgagaacttcagaaaaggaatgaaggtagtgacgtatcagcggacaaaagggaatactctttttactgtggactgtgatcctgtggaggttgctgaccttcacgcatgctgaagccagagatccgaccattacggtagtctgctgcttcgaccgaaccagtagggtacgggttgtccttctcggagttctccaagccagcacgcacaccttcgaggtatgcaacggtggcatccattccaggacggaacggtgggttgaactcagcttcggtcatggttcccaggaaggagacactgagcatgatcgagttggcaccgataccgctacgctccttgatctgagcgatgagtggtacggtgaagtcgtggctcttgccctgctcgaaagcatggatggccgactggaatacggtgcctacgcctgtgggtgcagcgaaggccaggaggtagtacgacttggctttcatggtttactccggtagagacagccccctgttacgggggctatcggcctggaagaggtgttagctgaagaggctaccaccggtgctggccggggctgcttgttcggctaccggctcttcttccttggcttccatctcggtagccggttccggctcttcggtggctacttcgaccggcgctgcttcgcttgccttggattcggcaacggcagttgccaggccggcggccgcttcggtgttgacgactttcttctcggccttcttcggcttctcgacgacttccacggtctgcggttcggtagcgaccggtgccttggtgccgaccaggctggctacggccagttccggtacttcgacgaaagccacgatgccgccgtcgcccttgcgagtggtttggaaggagatcgacagctgggaggcgtcggctttcaggccgttggcggtcaggtaggtagcgatgccagcggcgacttcggcttgttgcagttcgattttcatcttggttccttttaagtgagcatggccagggccagcttgaaatcattgtgatggaagaccccatactcagctgctgcacaggcatcagccatgtgttcagcccggctggcgatcacttcccctttcgaggtacgcggccagttgagatgggggtatttcttgactgcccattcgatcatggcctccttcgaagctgtcttcgagttacaagccatgaccttcaggtcagtgggggtgagcaggtggaatggcttgccgcttgctctcacggcagagaggatcccaatacacatgccgtagcttttcatggctgcggcagactgggatcctacgggcacttccacgaagattacgttggcttccttgatcacctccatgactctggtggtgatctcggtagacctgttcaagtcatcgctgttgacgcgaatctgcttgtccttggtcttggaagtctggatgacttcgatatgccgtaggctgagggtgttggaggttgtgtcgtactgaccgcaggctagtccccagttgctcatactggggtccatgccgattacgttcagtcttgccattgctgcaaccgctcttcgaggatctcgatgaggttgttctgcacatccttctgctgaacgagcagactgcccatgtaagcatggaccgaggcagcggcatcggaacgaaggaacgagtacaggctttcctggcgagctttcaactcgtccagttccagcttgagtcgctctttcggacccatgttctgcttgtgcagcttctgcatgagttcgtagccggcgaacttccacacctcgtcttcagcgttacgacgagcgacttctttgccgatctcagcatcgaattcgatggggtccacacaggatgactgcccggtgaccgtccagccgttgaccagggtaagctggcatacggtggtcagtccgctgggaagtatcgtgaaagactcttccacgatcatgttcttcacgtcttgcgggttgactttcattcgctacctccgagtagctccagctgtttcttcagccggttgatttcttcccgtagcttcttggtttcctggtaggcaaaccaagatgtccccttgctgtagctcgccatgatggtcttcacttcttcaggggtcagtacggtcagcttgatgtcggaattgggttcacagaacatcgaaccgtcatcccaatcgaagccaggaaccacactcagcacatccacagatggcctcgccccgacagtaccggggcgcaggacagggatgcgtaaggtgtggtccagcaaccgttcgcgttgttgcgggttcgtgcagtagctcaactgccgcttcaacgaatcgagcagttcccggaccttcatggcttagctgaacaggcttgcgggcttgccgccacctgcttggccgcctgccggtgcaggacgaccggaagctgcgccgccaccggcgaccttcttggtcttgtcgcggacggtaccggccttggcttctttccacttgtcgaagaactcgggttcagccttggcacgggcttcgttcagggtcttcttggtgccgaagtggaagaccgccgccacgtcgttcagttcgcgggtttccgacgaatcttcgtactggccggtggcttcgttcttgacgcgcttgttctcgatgatcttctccagggccaggtagatgtccttgccggtcaggtcagcgaggaccggaacctgcttgggtacttcggccttggcgtcgtagtcgtagatcttcagggtgcgctgttccggcacacaggccgccagttctttttcggcggtcatgaggcagatggcgttgacgatattgaagcccggcagatagtgcttctcgccctcggcgttcacgtagtagttgttctggcctttttccttgctgctcgtcacgtactgctgaatcttcagcttgcgaccggtgccgtgctcttcgaactcgaagttcactgccagagcgccgccggaggattcggagccgtaggcggccaggatcttgaaggcatagatgtcggtgtcgaagatacgactgccgccgccgatgctgtccttggcttccttgatgtcgctgttgttgctggtgctgaggttaccgaacatagtgctgtttcctttcgatgcgtgaatcagttgtagtaccagtccagatggtcaagaaccttctggatgtcgttgtcgatgaaggtttgctcgtgcgtccacatacccatgggaccacgaatgcgctcaccgacagtttccttggtgatctgcgtctggaagacgtgcttgtagccaagcatttcctcctgcggcgtgatctccaagagcttgttgttctccttgaacggctccagcttcccgagttctaccttcttggtggagatcaccgtggagaagtaggactcaatgccgttgttcttcaaggcgcccttgaccggaacgcacacgtccatggccatggttgccttgttgtactcttccttggtgtgagccaggaagatcaccttgcagggactgctggcaaccttctgttgcatcagatccttgaagaactgctggaaatccatccacgcagcttgcccgttggcagcccggtagatgtactgggactcgtacatgtccagcaggtaggtgagggtgtcgatgatgatggtgtgggcttctacctttccctccaccactgcatcgaagacagtggggatctggtagggatcggtcaccgtccgctcgatgaagcgagacttgaacggcagccgcttaccggcttcgcagttcaggtagatgaccttctccggctcccggagattccgcagacaagcagacttgccagtagcggacagaccggaaaccaagaccagatggtcgttcacttgcgtcatgattgactccatgttggaagcgaaagggtgccgaaggcacccctaagctcagttgccgttggccccagctttcttggctacagagaccatgatggtggaagcgatctcgatctccgacagcttgtcagccatcttcgagttgagttcgttcaccttgccgtggattgcattgacgctgaagccagcatccagaaggatcattgcgtaacggagcaacatgttgttcctgttgccgtcgccggtgttgttgattacccaacgctccagcttgtccatcgacgcctgatccttgaggttacgccgacgctcttcatccttcgtggtcttcgggatgtagggcagtgcgtcgaacaactcaccatccaggtattcgtagtggccggcatgagatagccacttccgtgcacgctgaccgacgccatcgtccacctcgaaaggcagggattcgatgacggcgttgtagaactccttgtactccttggcgtccatcttcagggtgtagttcaacggcagaatgatgcggaagcgatcaccgttgccgtccgtctgatggcgtttcgtggtgtacagaagagccttgtagcccttcaggaattccttggccgtggacagcttgcacccatggtcgatgtcgataaccagcaggttgaaaccaacccggcagttctcttcattgcggtgaccctttcgctcttccccaccattgaggtggtggttgatccagtggataccattggcttgggtcatcttccataggtcatcccaagtcgctagatcgttgaagtagccgtacgcgatgtcctgcgagtaggccacgatcatgctcttgtcatggatgtcggtggcttggagtgcttccccacggaggaacatgatgtcctgttcgtaggtcttcttgatgatgatgttgttcttgtagccccaggcagtagccatgaccagcatgtcgtctttctgctgacgggagccacggtagaacgggagatcttcatccagttcggccacggtggtttccgagttggtcgctgccaggtacttcgccagcttcacgtagggacggtccctggtcatgagcatgtcgaagcactcaccagattcctcggcaaccttgatggccgcgtagaggtgatccatggtgagtaccggcgagtcgtccacgaaagcataggcacctgccagcttgagagccttgaagtaccggtgcgtcacttctgctttcttggcttcctggtgctccggcaagcctgctgcgatcttctcgcacttcagcttgtactcgatggacagcagagcggtgtccttgtccatggtgagcactcgacgcatattgcttgcgtctgccagacgttccaggtcatcgcagagatcttcgatgaaggtggaggtggagttcttcgtcatgaggtcatagacctcttccggggtcatgtccaccttcttgccttcgccagccatgccgaagaagcaacgacgagcgtagccagtctccagcaactccatcagctggtcctcggtcttgccgccatccagcagcttgcctggggtaccgaaagccatgaggttggtgggcgtacggccgatgatctcttcgccgcgaaggttgtcgttggtgttcttgaccagcttctgcttgaccgaacccacgtcgaacagttccaggaacgtcggcatgatctcggtcatggcaggcaggttcaagccaatctcatcgacgacgaggttgaccgcaccagcgttggccatcagcagcttgtgacgcatctgcttgacggctgggccagtacccgagtcgaagtcatacagcagggggccgagagacttgaactccttacggacagcttcctgttcgtcgggtagttcggaccccttacggatgtggcgcttgaacgccagatcgtcaaggtgcttctcggctgcggtgtcgaaggtttccatgaaccgatggcggaagccataggtaatctggtcctccatcacctttgtggagaaacccttacctgcacccgaaggcatcaggttgagggcgtacatgttgaccggaatctcgccgcgttcgtgagtcttgatgtggcaacgcatgtgcgctgccatcatcgagaactggaagccaaccaagatcctgaagaacctgtggttcttggattgggtcttctcacacagaatttcgacgatgcgttccgaggtcgggtggtgttgcatttcctcgtacttgagcatcacttactccaggtttatacgatgaggtcgcccttggcgatgagcatgtccttctgcgtacacagtaggtatgccgggcagtagaggcaggctttcacttggccagggatggtcttcactacgccaacgttcccgtccttggcacggtgagccatggcttccgacaggctgtcgaagttcttggtgctgcgagcacccttctggtcagccttggcggggtcacgatagtacttgtacaccggctggctacgccatagctcttcgtcgctgcacaggggcagatccgcttcaggggtatccttcagggacatcagccacttcaccctgttggtgatccactcttccgtctcggcgatgggcatcaggttgaataccttcgaagccacacgactctgagggtagtccttgttctgcttcgccatgaacttctgccaatccgtgaagatgaagtggattcgcatggtgtccttggtgatcagcccaggattgagcgcacggtagatcgacccttgcaggatgtagtcgctgtccttcgagtccttgatgtagctgaaggtggtagtggacttgaagtcctccacctgaccgtctgccacgaagtcgtacttgccggataccattactcctgcgtactccttcttggaccgctgctccatgtagacggtgatagcaggctgctcgttggcttcgttgaacgccttgagttccgcctcggtgggattcaccagcacacgtttagcgacgcttgcagggatgcccagggcatccagtgcccggtccttgttcacggtccaagccttctcgatggagtcgtgaatcgccgcccccatgcggttggcgatcatgccctcgatatcggccatggagtcggatggcttgatacgacgagccaggactacctgcctgattggtttcagcagggtggtagccgacagccctgcttcgctgtagtcgtagtagtccgaagccagccacaaagccatggccatcgggatacccgtctggttggtgtagatctgacccatgtcagtcgtcctctcctgcgttgtcttcaagccaacgattgagggtatccctggcttccttcacgtcttgccagaggctcttgccgccgctgcgttggcctggtgccatcagcttcttgcgagcgtggtccagggcaccggatggatccagttcacccagggggaacagcatgttgatccggtacacgtctacgaacttccaggcacgtgggatcggacgctggtagcgattcaggggtgcagtatcacgctggaccttgtgggccggttctgctgacttgaccggcaacctgcggtgaagcttctcgcagtcttcacagggttgcccctgtggatgctgtgccttacacacggggtgaggcgagtatcgtggatctctcattggcttgctccaaagtatcggttgaggtggaacacggctagcttggctgctgccatgtagcgaagcgcttgtcgcttctccaaagccatgccacccatgagcaggtcgtagcacagctgaggttcttgtaacaggacgaacagacgtgcagccgacaacggcctctgggagccctctgtggctgatgcgatgcctgagaggatgtcctctacccctcggtctgaaaacgcatcaggcagcccctgtaggcgttttgcgtggggattggtaaaccaacgagtccgtggtcctcctatcgatctacgatccaagccatgaaacctgatggtgtcagcccgagccttgcccatctgagccaggagatttggcatggagtcgatggggaagtccttgaagggtacgtcctcaggggtgagtttttccatgaaaacctcctggttaaaaaatgatcacgaaagtgtcttatatataatagggactctcacccctcttctttcgaaggggttcgcccctggaaggggccgtcccagggcgaccactagcgctcaccctcccccttctccatccagggaaggggtcaggtgaagtggtcgcccgaggagcgagcgcagcgagtcccgcaagggatgacccgtaacctgacccctgaccgggggaaattgaatattcaattattccttccgcctatccacgcatccactcccgtctcgctctgcggtgctcgctgcgctcgatcctcggcggactgcgttcctgcgtggataggctgggggaggttagggaggttatactttgaccaactctggaggaaccaacatggtagacacttgcaacatcaatggggtctgcggaaccggggactggaatggtcctaagcccggtgaccccaacatgaatgatctgctgctgaaggcaactcctgccttcggtggtatcgacattgagttcacttggccaactacgaacccaggtgcagttggcactactcgactgttccgaagcactgacgctaacttcgctggtgcaactatccgggccttcgtcaacggtaacttctacttcgacaagacagaccctggctccaaggtagatcaacgctactactattggattcagttggtttcgatcaatggcactgatggggacatcattggtccagcttcggccactgctcgtccactcattgagcagatgattgagcagcttactggtgagattgacagtggtcttctttcccaagagttgaggaaagagattgctcagatcgaactgaacaagctggggatcacccaggaagagattgagcgagccaagaacgatgatgctcttggtgttcgtctcactcagatcgatgcaaagatggatcagaatactgccatcttgcaggaagaggttcgtgctcgtgtaactgctgacagttctctggttcagacggtcaacaccatgtacgccgacttcaacgggaacatcgcagcaatccagcaggagaacactgcactggcaaccaaggttaatgccttggcttcttcagtgaccacgatcaacgccacggtcaacggtgactcagcctctggtaaagttggcttggttgctgaggtacagaccctggacggtaaggttacccagatcggtgctcgatggactgcgactgttgatgtgaatggtttggttggtggcttcggtgtgtacaacgatggccgcactgttgaggctggcttcaacgtagaccgcttttggatcggtcgtcctggcactccgaagaacccaggcagctacccgttcatcatcgacaacaacatcgtttacatcaaggaagctgccatccagaagttgaccttcgacaagctcagggcacaggatggcagcttcattgttcagaacggtaagatccaggctgactacatcgaagccaaggatatcgtggtgaacaacatccagtcggacaactaccaaccaggtgtccaaggctgggcattccgtcccaacgggatcatggaaatcaacggtacggcaggcactggccgtatgactatcaacaacgccaccatcaaggtgtttgaccaagcaggcaaactccgggtgcacattgggaacctacaagcatgagttacggattccgcttttacgacgccaacggtaacgtcaccgttgactcaaccaacaagtccttcaggtctgtgtacaggcaacaggtgtttcctgtcctagggggcactactaatttgccccctggttttgatgcaagtaagggggacatcttcttctttacttggtttcaactagcacctaacccatggcctcagtttgtagactttggtttcgtcaataaccagatccagtggtacgacacttactctactagctatggcaaagcctatctcaacgtggtgagcttccgatgacttacggtattaaactgacaaacgaaaacagtgacatctgcatcgacgagttgaatcccgtctatgttgttgtgttcgaaggatcctataagtatgacagccctgggcaagactttatctacgtgcagttccctacccctatcagatcacagagcttgccaattttcttcgctaagcaagatggccctcatggtttcatggacttcacttggttcggttctaacggtaactggaccggttgtcgctttgtactgaccaactttgctggtatggctccttcggtgtattccggtaagtacaagatcgttgctgtgcatatgccaaagactgctggctggggtatgcaggtatttgacgctgatggtaatggcgtattcgatactggctacacaccagcagtattccttggtggtatccagaggttcttgccctacggctacaaccctaacttccctggtggtcgtacactggggagttggtatgccgatgcaaccaaaatcaagcagggtgcctacttccgagtggacttcggtaacacaaccttcaggcacaatggtttcaccattggaatgcttaacggccctacgggttggatgtacatcgctgctttcatcagcggcaacaagcccggttacactattgaccatcctttgttggccatcgaataaacggtacactgcacgctccattcgaagaggatacaaccatgactaccaaggtgatcttcaccttccataatccggatggcagcccacaggcgaacgagaagttcaccgtgcgactgacccgtcctggcatgagcgatgcagagcactgcgtcgtaattcccgaaacctacgagatggtgaccgacgccaagggcgagttcaccatggacttggaatcgtctacctctgcctaccgcgtcactgctataggcgatgacgacgagtacgaggacgatccctgctcgcagtacaccttcaccttctacgtgccggactctgttgatccggtctacgtacaagaactgatccttatgcctccgcccaacaacttgccatgggacgaggaagccatgaacaagatcacccaagcggtggtcgatgctcgcaatgcacgagacgatgctgaagagtctgctgaccgtgcagaggctcaggttggtttggctgctgagcaagtgacccttgcaaaggcagaggtgaccaaggctaccgcccaggctgaccgctccaagacggaagcggaccgggctactacccaagccaccaatgcagccaactcggctactgctgcggccaactctgccacccaagccaacacgcaagccaaccgtgctaagacggaagctgaccgctccaagagcgaggctgatcgggcacgggatctggctgatgccgtggctgaaaaggtcgagggcggctcgctgcctcctctggtgggcatgaacgaaaccttcacctacgaaggtaccgacccctaccgatggactgtatctggccctgctacggctgtctcggacggtagcgtcatgcgcctgaccaagaccgatggcagcggttcccgtgcgttcgtacggcaggcagtgtccttcccggacagccactggatcgtctacatgcgtgtgaagacccagaccggtaccgcctcgcggaactgttctgcacagatccgcttcatcgctgctgacaacaagaactgcgtggtctacttcaacgtcaatgcgaatggcttggtggaacccaacaccatccacatgcaaggcaccgagggtgatacccgcaacgctgcaaccatgttcactggtttgggaaccgaggactggctagaccttgctgtgaagtacgatgcggtaaaccgccacatcgaactcttccgccgcatgcccaatggcacttggcagaagggtggtggtcgtctgatggtagatgccatcaagcctgctttcatcgagatctcgtcgatgccggtagccccgcagaactggtggctggatactgacttcatctcggtgtgcaagcccaaccttatctgctacggcgacagcattgctgctggccagaacgagtatggggtaacccgtgggaacaacccctacaacaacaaccgcaactgggctggtacctggttcggaaaggttccgctctacgccaccaaccggaacaacctggtgcttgtccagggcgtggaaggccgtcgtacctggcagtacctgagccagctgtcggagatctccaactccggcgtgaaggtagtcttcattcatgccagcacgaatgacgtgaacgatgccaccatgaccatggccaagcgtacgtcggacacccaagccatcatcgaccagcttcatgctgtcggtgctcaggtagtgctgttcaactccatgcagggcacgaaggcgtacaacgatgcttcgtccactaccgtcaagctacgggactacaccgaccagtggtggaataccgaactgcccaaggtcaatggtttggctcagaccctggacatcgctcgactcatcgccaaggacgggtacatggaccctgccctcggtgcgagtgacggtctgcacctgaccaatgcctcggcacagaagatcgccgacaagcttggccagttcttctccaactccagcgataccaatggcttcgcttcgttggatagcccagccttcactggtatcccgactgtacccacgcagactcctttcctgccttacggcaagcagatcgccaacacggaatacgtaagcaccttcatccaggactggaccagtaattacgggtacggcgacctgacgatgcggaacctcaccggtgcccagatggcaggcggtggggtgcgtagcggttattactatgttcctggggattcttctaaccccttgccggggaatgtttatgcattcgtgcaccacatgtcctacgacaccaacaagggttgggaactctggaaccactgctacaccgaccgtgtgtacatgcgttattcgaacaacgcaggtgtatggaatacgccggtagaaatggttactgagaagtggatggagcgtaatagcttcatgaccccacgggtttctgcattcaaccgtctgcccgtggcttcttctgttggttttgaaggggttgttcccttgcagaccaacagtagtggggcttggcgtaacgtgaatgctggtgtagctgggttgggccttctcggtgcaactacggctggtaatgcactgaactacattggtggtatgcccaaagccccaaccaatgatcgggccaacagtaacctcaacaatttacctgatgagtgtggtttctacggtttgggaccagcaccgtattccaatatccctccgggggttgatgcgattaacccagtgggttctaccgtctaccatcaggtttacgacgccaacaccgctacgcaaattttcattccgcgtacttcggacatctgctatttccgccgtaaggcagggggaacctggagtccatgggttcgttacctgactgatttgcagctggtaggcaccactactgacagcagtgccggtgttccgaatggtgccatcatgcaggtcaatgggagtgctgctgtaaacgtaggtgttgccctccgctttgcagacggtactcaaattgttcgggcgttactccaattggattacggtgcagtagatatccttcagcgtcagttcactttccccatggcttttgtgggtaagccggtggtaaccgccaccctggaacaaggtactgttgctgacatcaacaacatgcctttgcaggctcttggccctgttatggttgccagtatctatgcaggcaactgcaacgtgcgtgtcatgcggtct

SEQ ID NO: 4 - DNA, 43462 bp, Bacteriophage F197/08
taaattatccaagagatgttagtactaacggtactgtcgaatatttagtagtaacttcagattacaagcgtatgacttatcgaccgaacggtacaaataaagtgtttgttaaaagaaaagaagcgggttcatggtctgagtggtcagaattagctattaatgattacaatacaccttttgaaactgttcaaagtgcccaatcaaaagctaatatggccgaaagtaacgctaaattatacgcagatgacaagtttaataaaaggtattcggttatttttgatggaacagcaaatggtgtgggctctacattgtacttaaatgagagtttagaccaatttattttattaatttttttatgggacttttccaggtggtgactttacagagtttggcagtccttttggaggaggaaagatttcattgaatccctcaaatcttccagatggtgatggaaatggtggaggtgtttatgagtttggattaactaaatctagtcgtacatctttaactatatcaaacgatgtctatttcgacttaggaagtcaaagaggctctggtgcgaacgcaaatagagggacaattaacaaaattataggagtgagaaaataatgcaaatattagttaacaagcgtaatgagataatttcatacgctatcattggcggctttgaagaaggtattgatattgaaaatttaccagaaaatttctctcaagtttttagacctaaagcctttaaatattcaaatggggaaatagtttttaacgaagattattcagaagaaaaagatgacttgcatcaacagattgacagtgaagaacaaaacacagtcgcttctgatgacatcttacgaaaaatggttgctagtatgcagaaacaagttgttcaaagtacaaagttatcgatgcaagttaataagcaaaatgcactaatggcaaaacaacttgtgacacttaataaaaaaattagaagaggttaaaggagagactgaaaatgcttaaattaatttcaccaacattcgaagatattaaaacatggtatcaattgaaagaatatagtaaagaagatatagcgtggtatgtagatatggaagttatagataaagaggaatatgcaattattacaggagaaaagtatccagaaaatctagagtcataggttataatcttatggcttttttaatttgaataaagtgggtggtgtaatgtttggatttaccaaacgacacgaacaagattggcgtttaacgcgattagaagaaaatgataagactatgtttgaaaaattcgacagaatagaagacagtctgagaacgcaagaaaaaaatttatgacaagttagatagaaatttcgaagaactaaggcgtgacaaagaagaagatgaaaaaaaataaagagaaaaaatgctaaaaaatattagagacatcaagatgtggattctaggattaatagggacgattctaagtacatttgttatagccttgttaaaaactatttttggcatttaaaggaggtgatcaccatgcttaagggaattttaggatatagcttttggtcgtgtttctggtttggtaagtgtaagtaatatttaagagtcagtgcttcggcactggctttttattttggataaaaggagcaaacaaatggatgcaaaagtaataacaagatacatcgtattgatcttagcattagtaaatcaattcttagcgaataaaggtataagtccgataccagtagatgaagaaagtgtttcatcgattatcttaacagttgttgctttatatactacatataaagataatccaacatctcaagaagggaaatgggcgaatcaaaaaattaaagaaatataaagctgaaagtaaatatagaaaagcaacagggcaagcgccaattaaagaagtaatgacacctacgaatatgaacgacacaaatgatttagggtaggtgatgaccaatgttgataacaaaaaaaccaagcagaaaaaatggtttgataattcattagggaagcagttcaatcctgatttgttttatggatttcagtgttacgattacgcaaatatgttttttatgatagcaacaggcgaaaggttacaaggtttatacgcttataatattccatttgataataaagcaaggattgaaaaatacgggcaaataattaaaaactatgatagctttttaccgcaaaagttggatattgtcgttttcccgtcaaagtatggtggcggagctggacatgttgaaattgttgagagcgcaaatttaaacactttcacatcatatgggcaaaattggaatggtaaaggttggacaaatggcgttgcgcaacctggttggggtcctgaaactgttacaagacatgttcattattacgatgacccaatgtattttattagattaaatttcccagataaagtaagtgttggagataaagctaaaagcgttattaagcaagcaactgccaaaaagcaagcagtaattaaacctaaaaaaaattatgcttgtagccggtcatggttataacgatcctggagcagtaggaaacggaacaaacgaacgcgattttatccgtaaatatataacgccaaatatcgctaagtatttaagacatgccggtcatgaagttgcattatatggtggctcaagtcaatcacaagacatgtatcaagatactgcatacggtgttaatgtaggcaataaaaaagattatggcttatattgggttaaatcacaggggtatgacattgttctagagattcatttagacgcagcgggagaaagtgcaagtggtggacatgttattatctcaagtcaatttaatgcagatactattgataaaagtatacaagatgttattaaaaataacttaggacaaataagaggtgtaacacctcgtaatgatttactaaacgttaatgtatcagcagaaataaatatgaattatcgtttatctgaattaggttttattactaataaaaaagatatggattggattaagaaaaactatgacttgtattctaaattaatagctggtgcgattcatggtaagcctataggtggtttggtagctggtaatgttaaaacatcagctaaaaaccaaaaaaaatccaccagtgccagcaggttatacacccgataaaaataatgtaccgtataaaaaagaaactggttattacacagtagctaatgttaaaggtaataatgtaagagacggttattcaactaattcaagaattacaggggtattacccaacaacacaacaattacgtatgacggtgcatattgtattaatggttatagatggattacttatattgctaatagtggacaacgtcgctatattgcgaccggagaggtagacaaggcaggtaatagaataagtagttttggtaagtttagcacgatttagtatttacttagaataaaaattttgctacattaattatagggaatcttacagttattaaataactatttggatggatgttaatattcctatacactttttaacattactctcaagatttaaatgtgcgtaactggcaggtacttcggtacttgcctattttttttatgttatagctagccttcgggctagttttttgttatgatgtgttacacatgcatcaactatttacatctatccttgttcacccaagcatgtcactgggtgttttttccttgcgatagagagcatagttttcatactactccccgtagtatatatgactttagcattcccgtataacagtttacggggtgctttttatgttatacttacttttatatagtaggagtgaactatatagccgggcagaggccatgtatctgactgttggtcccacaggagacatcttccttgtcatcactcgatacatatatcttaacaacatagaaatgttacattcgctacaaccgtatcttaatcgatacggttatatttattcccctacaaccaacaaaaccacagatcctattaatttaggattgtggttatttttttgcgtttttttcggggcgaaaaaaagggcagattatttgaaaaaagggcaaacgcttgtggaaaatctaaaaggttaaaaaatgacaaaaacattgatacaacagtgttttttggacgctcgtgtacgttagagaatgaccgctttaccatcacaatatgatgatatgtttatttcaagaaaagctttaacgccagtgttctcaagcgttttataaagcttgtaaaaaaatataagggcaaaaaaaagggcggatttaagctaacttggaatgttttcgagttttttgagttagttctctatccatttttttcagttacatgagtatatatgcgaatggttgtttttttcatctacatgtcctacccttttcataattgcttttaaagaaacattcatttctactaataaagttatgtgtgtatgtctaaatgtgtgcgtggtaactttcttattcatatttaaagcttttgtagttttcttaagcacaccggcgatttgattattacataaaggattcccttttttttgttgtgaatatgaaccctctgtcaacatagctcgaattccatcttttcaacattttgttttccagtattatctttttaaaaatttctacggttctagaattgatgctgatacttctttttgaacttatagtctttgtagtgtctttgtatccgaatccttcctcgtatttaatgcggtgaattgtacctgttatattgatagttttgtttaataaatctatatctttttcctgcagtgcttgtagttctcctatgcgcataccagttaaagcctgtacttctaagatgctggcaattaaaatgcgatttcgcttgtgtaacttattatcatttagtatatgatcacgtatctgtaggacttggttcatttctaaatagttgtacattttagattcatctttttcgatatcctctattgtttttcttcttttaggaattttgacattagttaacaaatattcatttggataattgtaaaatttaactgcatatttaatagctcctttcatatctccgagttgacgggttacttgattttgagaatagatatctgataatttattaataaatatctgcatatattttgtatctagtttgtttaaaagcaagttctcagagctgtatcgtttaatgtttctaattcttatttttatattattaagagtagtcaactttgaacctgatgtttttatatgatattcaagccattcatctaatagcgcgtgaaaagtcaaagtttttaattcgcttgacgacttgttgttcagttttttcttttattttttcttctaaacgaaacattgcttcttttttgagattgttttgtattcttgttcaacacaacacttacgcgcttccatttatctgtgtatggatctttatacttctcgtagtatctgtatttagtttcgttatttttgtttttaaatttttcaatccacatgtttatacctcctgcaagaacgtatgttctataaaatattaaaaaataataagggtagtcgggctacccgtaatttagtactaggtactaaatgtgttataataaaataaaaagtaggtgataagatgactcaatttctaggggcgcttcttcttacaggagttttaggttacataccatataaatatctaacaatgataggtttagttagtgaaaaaaaacaaggttatcaatactcctgtattattgatttttttctattgaaacatgtttgatatggttttataatttttaataatgttgatttaaaaaaatttgaatttaattcagttgcttacaggtctaaaagcaaatattttgtttctatttatttttgttttaacagtgtttgtatttaatcctttaattgttaaatttattatctggttaattaatataaccagaaagtttatgaaattggattgtataagcttattagacaaaagagacaagttgtttaataacaacggtaaaccagtatttatagttataaaagactttgaaaacagaatcattgaagagggtgaacttaaaacctataattcagctggtagcgatttcgatttactagaagttgagcgacaagatttcaaagtatctgatttagcgtcaaacgatgaattgtatattaaacatacgcttgtagaccttaaacaacaaattaaattggatttatatttaatgaatgaatactaatctttttttcttagctttttctgataaagtgctttttaatttttcgctggcgcctgacttttcaaaacttttgtttaatgggttactacgagtagtttcttgttttttgtttttatctaccataaaattctcaccaccattcaacgtctacactagtaggcgtttttttgatttttttttaatcctttttctcgtcacgctatataggtacttttaatcgtaattaaagccaagtttatttaaaatctctaaataatctgacgactttgcccgtaatgtttacgtcatttatttttgacattgggtagcttctatctttaatggtaacgtaattagataatcgctttagggtaaatgtgtcatctgagttaaatataatttcacaaaaatattcatcagtcgcagttccgttttcaggacagtaaacagtaattatatctctgtcaaagataaagtccattacatcatcatcctgatctaaaatgtagcaaacagtcatatcttcattttcaactcttcttgcgctatttatagtagttattggttgtgcaactaatttgccttttgcctctgtgtatctttttggaaattccacataattcattaaatcgattgttttatttgtttccatattagctcttctttcttatattgttttattagttaatattggctcctggtactgcgctagcaccagctcttgcttcctcttcttttccttttttgtactcttcaaaagctttagcctgttcatctttagtccagccaggcgaaacgacatactcatcatttaaattagtattttgtgaatcgttttcatttatatttgcaggagtattattagatggatctgaattattattaagttgattgttttgtgattggttttgattgtttgaattattttgtatgctattattaggtggattttttatcttcaactttttttcatttttttcttgttgcgtttttggtttgctatctttgtgtttttgtgtttgtgacttttttattttcttcttttttttggttttttcttttttcaccacaagctgttaaagctaatgtacttactagtagcagtccgattactttttttcatatgtatctctcctttgtttatatttccttatatttaaaaactctcaacggctcaaacgtaatagaatactcgccatagtgagttccaataccatatatctttttatattgttctatagcttctagtatgtatgattcactcaactgcagatactctgacaactcgtacaaattacgaacaccgtagttgtgagcttctacaatttcatgtagcggtacagctgaagtaaaaccatgtctacgtgcataattttcaaattttctattaatccattttgtttggtctaaaatgttgccatacgtcaacttgtggtgggcaagttcctcatataacacttctgctttacgtacttctgataaattacgccttatataaatttttccgttcatatagcatccaggttggaaatttggaagctggtcagtttcttctatctttattttttcgttatttatgcaaagttcttcgtataatcccaatataaacaccctttatttgtctctatttctaacccattcaatgaatctatttacttcttcaatctcttcttcagttaatccctccttatcaaaatgagcagcaattgtttcttgatgtatatctttttttgattcagtaattcttgatttcggtacattgaagtaatctgcaagttgttgaattcttttaattcgtggatatttagtttgttgaatccaattggagactgtaggttgagaaactccaatagcttcagcaagttctctctgatcaatatttttatcattcataagttcttgaaggttttcagataaaatttttctgactttattattctccatagttgtctcctttaatattacttaatgtaatattaacttaccataaccgacattactttacaatactttttataactttttatgaagaaatataactttatctgttgacaagtaatacaaagtaatataaagttatacgtgtgaaagggaggtggacgacatgccggaacaattatccgtaagaaaatggagacttgtaagggacttgaaacagcaagaagtagcagatatattgggcgtcaatgcaaagacagttggtcattgggaaaaggatgacactaatttaagtaatgttacagtttacgctttagcaaagttatatgatattgaggtagaccagataaaggtctaaattttttgaccttcgtataactttttataacttttaggtaatgtaacaaatggacataaacaacttaaaaggaggaacaacaaatgaacgaagaaaaattaaagatgattctcttacttcttgaagatataccaagagacgaatggaatcgattagtaaatgaagtaaataatcaatacagttaccaagctgacaaggtaggacttgccagtgataactgtcaacaaatagcaaataactataagcactatggattttaagatggataaggactatcgttattcttttcacctttaacgttaatgtcgaaatacaaaacatgatctaaactgacaactctatcttttggatgaatgatgtgtagagttttgctttcagcatcttttatatgttcttgtactttaataacttcaccattaattaaatgtaaatctaaagaagtaacgatttctttatctaaatattgagtgagcaatctcttatgtatacttatcacctccttaggttgataacaacattatacacgaaaggtggaacaacaaatgaacaaaaaaatcagaagggttagacataatcataccaaggattttcagaagagatcatgcgtcagtagaatctttaacagaaaatgaacgtcgactaagaaaggaaatattaggaagtattaaaaaaggtgattacagctacttagaaataaacaaagttttctatgcattagatagagaacttcaatacagagcgaataataacaaactttaacatttatcgaaaggaaagatagaaatgccaaaaaatcatagtaccaccaacaccagaaaacacatatagaggcgaagaaaaatttgtgaaaaagttatacgcaacacctacacaaatccatcaattgtttggagtatgtagaagtacagtatacaactggttgaaatattaccgcaaagataatttaggtgtagaaaatttatacattgattattcaccaacaggcactctgattaatatttctaaattggaagagtatttgatcagaaagcataaaaaaatggtattaggaggatattaaatgagcgacacatataaaagctacttaatagcagtactgtgcttcacagtcttagcgattgtgcttatgccattgctgtacttcactacagcatggtcaattgcgggattcgcaagtatcgcaacattcatatactacaaagaatacttttatgaagaataaaaaaaactgctacttgcgtcaacaagtaacagtgacaaacatttatcaaaatatacaacttaattaaatcaaaatatacggaggtagtcaactatggctgaaaatattaaaactgaacaacattattacactaaagatttctcaggatacagaaatgaagaagataactttgtagcaaatcaagaattgacagtaacaatcacattgaacgagtacagaaaacttattgaaataaaggctgttaaagataaagaagaagatacttatagaggtaagtattttgaggaagaaagaaaaaaacgaaaaattggaaaaagaaaatataaaactaaaaaacaaaatttatgaattacaaaacgaagaagataaagaggaggacgaagaagacaaggaggacgagaaagatgtattacaaaattggtgagataaaaaataaaattatcagctttaacgggttcgaatttaaagtgtccgcgatgaagaggcatgatggtatcagtatacaaatcaaggatatgaataatgttccgtttaaatcatttcatgtcatagatttaagcgaactatatattgcaatggatgcaatacatgacgttgtaaatgaatggattgaagaaaacacagatgaacaggacaaactaatgaacttagtcatgaaatggtaggaggatttaatcaatggcaatattagaagatatttttgaagaattaaaactattaaataacaatttacgtgtgttaaacactgaactatcaacagtagattcatcaattgtacaagagaaagttaaagaagcaccaatgccaaaagaagaaacagctcaactggaatcaattgaagaagttaaggaaacttctgctgatttaactaaagattatgttttatcagtaggaaaagagttccttaaaaaaagcagatacttctgataagaaagaatttagaaataaacttaacgaacttggtgcggataagctatctactatcaaagaagagcattatgaaaaaaattgttgattttatgaatgcgagaataaatgcatgaagctagatcactcaaatagagctcatgcaaagcttagtgcaagtggagcaaaacaatggctaaactgcccaccgagtattaaggcaagtgaaggtattgcagataaaagtacagtttttgccgaagaaggtacattcgcccatgagttaagtgagttatatttcagccttaaatatgaaggcctaacacagtttgagtttaataaggcttttcaaaattataagagaaatcaatattacagcgaagaattgcgtgaatatgtggaagagtatgtagctaatgtagaagaaaaatataacgaagctttgagtagggataatgatgtaatagctttatttgaaacaaaattagatttaggtaaatacgtccctgaatcttttggaactggtgatgtcattatattttcaggtggtgtacttgaaattattgaccttaaatatggtaaaggcattgaagtttcagctatagataatcctcaacttagattatatggcttgggcgcatatgaactgcttagtttaatgtatgacattcatacaattcgcatgactatcatacaacctcgaatagataacttttctactgaagagttaccaatatcaagattacttcaatggggagccgattttgttaaaccattagccagacttgcttataacggtggaggagagtttaaagcaggtagtcattgtagattctgtaagataaatcattcatgtagaacacgtgcagaatacatgcaaaatgtgcctcaaaagccaccacatttgttaagtgatgaagagattgcagaacttttatataaactgcctgatatcaaaaaaatgggctgatgaagtagaacaatatgcactaaatcaagcgaaagaaaatgataaaaactatcctggttggaagcttgtagaaggtcgttcacgaagaatgataactgatacaaaagcaatgcttgaaaagttagttgaagcgggttataaacctgaagatattacagaaaccaagttacttagcattacgaatttagaaaaattaattggtaaaaaaagcattttctaaaattacagagggttttatagaaaagccgcaaggtaaattaacacttgctaccgagtcggataaacgaccagctataaagcaatctgctgaagatgattttgacaaactataaaaatttaaaaggacggtatataaacatgaaagcaaaagtattaaataaaactaaagtgattacaggaaaagtaagagcatcatatgcacatattttttgaacctcacagtatgcaagaagggcaagaatcaaagtattcaatcagtttaatcattcctaaatcagatacaagtacgataaaagccattgaacaagctatagaagctgctaaagaagaaggaaaagttagtaagtttggaggcaaagttcctgcaaatctgaaacttccattacgtgatggagatactgaaagagaagatgatgtcaattatcaagacgcttattttattaacgcatcaagcaaacaagcacctggtattattgaccaaaacaaaattagattaacggattctggaactgttgtaagtggtgattatattagagcttcaattaatctatttcctttcaacacaaatggtaataagggtatcgcagttggattgaacaacattcaacttgtagaaaaaaggcgaacctcttggcggtgcaagtgcagcagaagatgatttcgatgaattagacactgatgatgaggatttcttataagtcaataggtggggttttagccccactttaattttaaagaaattgaggtgtcaagaatttgagatttatgaatatagatattgaaacatatagcagtaatgatatttcgaaatgtggtgcctataaatacacagaagctgaagatttcgaaattttaattatagcttattcaatagatggtggagcgattagtgcgattgacatgactaaagtagataatgagcctttccacgctgattttgagacgtttaaaattgctctttttgatcctgctgtaaaaaaagtatgcattcaatgctaatttcgaaagaacttgtcttgctaaacattttaataaacagatgccacctgaagaatggatttgcacaatggttaattcaatgcgtattggcttacctgcttcgcttgataaagttggagaagttttaagactacaaaaccaaaaagataaagcaggtaaaaatttaattcgttatttctctataccttgtaaaccaacaaaagttaatggaggaagaacaagaaacttgcctgaacatgatcttgaaaaaatggcaacaatttatagattactgtattcgagatgtagaagtagaaatgacgattgctcataaaattaaagactttccagtaactgcaattgaacaagcatattgggtttttgaccaacatataaacgacagaggtattaagctttctaaatcattgatgttaggagctaatgtgctcgataagcagagtaaagaagaattgcttaatcaagctaaacatataacaggtttagaaaatcctaatagtcctacacaattattggcttggttaaaggatgaccaaggattagatatacctaatttacaaaagaaaacggttcaggagtacttaaaagaagcaacaggaaaagctaaaaaaaatgctagaaattagattgcaaatgtctaaaaccagtgtgaaaaaaatacaacaaaatgcatgacatgatgtgcagtgatgaacgggtaagaggtctgtttcaattttacggtgccggtactggaagatgggcaggtagaggtgtacaacttcagaatttaacaaagcattatatttcagatactgaattagaaatagcaagagatcttattaaagaacaacgttttgacgatttagatttattactcaatgttcatcctcaagacttattaagtcaattagttaggacgacatttactgctgaagaaggtaatgaactagcagtaagtgattttttctgcaatagaggcaagagtcatagcatggtatgcaaaagaacaatggcgtttagatgtgttcaacacacacggaaagatatatgaagcatcggcttctcaaatgtttaatgtcccggtagaaagcataactaaaggcgaccctctcagacaaaagggaaaagtgtccgaattagctttaggttatcaaggtggcgctggagctttaaaagcgatgggtgcattggaaatgggcattgaagaaaatgaattacaaggtttagttgatagttggcgtaacgcaaatcctaacatagttaatttttggaaggcttgccaagaggctgcaattaatactgtgaaatcccgaaagacgcatcatacgcatggacttagattttatatgaaaaaaggttttctaatgattgaactgcctagtggaagagctttagcttatccaaaagcttcagttggtgaaaatagttggggtagtcaagttgttgaatttatgggcttagatcttaaccgtaaatggtcaaagttaaaaacgtatggtgggaagttagtcgagaatattgttcaagcaactgcaagggatttacttgcgatttctatagctaggcttgaagcatcaggttttaaaatagttggacatgtccatgatgaagtaattgtagaaatacctagaggttcaaatggacttaaggaaatcgaaactatcatgaataagcctgtcgattgggcaaaaggattgaatttgaatagtgacggatttacttctccgttttatatgaaggattaggagtgtgattgaatgcaacatcaagcttatatcaatgcttctgttgacattagaattcctacagaagtcgaaagtgttaattacaatcagattgataaagaaaaagagaatttggcggactatttatttaataacccaggtgaactattaaaatataacgttataaatatcaaggttttagatttagaggtggaatgatggctagaagaaaagttataagagtgcgtatcaaaggaaaactaatgacattgagagaagtttcagaaaaatatcatatatctccagaacttcttagatacagatacaaacataaaatgcgcggcgatgaattattgtgtggaagaaaagactcaaaatctaaagatgaagttgaatatatgaagagtcaaataaaagatgaagaaaaagagagagaaaaaatcagaaaaaaaagcgattttgaacctataccaacgaaatgtgagagcggaatatgaagaagaaagaaagagaagattgagaccatggctttatgatggaacgcctcaaaaacattcacgtgatccgtactggttcgatgtcacttataaccaaatgttcaagaaatggagtgaagcataatgagcataatcagtaacagaaaagtagatatgaatgaaacacaagacaatgttaaacaacctgcgcattacacatacggcgacattgaaattatagatttcatcgaacaagttacggcacagtatccaccacaattagcattcgcaataggtaatgcaatcaaatacttgtctagagcaccgttaaagaatggtcatgaggatttagcaaaggcgaagttttacgtcgatagagtgtttgacttgtgggaggggtaacgatggcaacgcaaaaacaagttgattacgtaatgtcattacaggagcaactggaattagaagactgcgaaaaatatacagacgaacaagttaaagcaatgagtcataaagaagttagcaatgtgattgagaactataagacaagcataaggaatgaagaactatattacgaatgcatgtcgtttggactgcctaattgttaaaaggagtgacgaccatgacagatagcgcacgtaaagaacgcttaaaccaattttttcggctctaaaagatatctgtatcaggataacgaacgagtggcacatactcatgtagtaaatggcacgtattactttcatgggcatatcgtgccaggttggcaaagcgttaaaaagacatttgatactgctgaagagctcgaaatatatataaagcaacatggtttggaatacgaggaacagaagcaactaactttattttagaggagatggaaatgatgaataaccgcgaacaaattgaacaatcaattatcagtgctagtgcgtataacggcaatgacacagagggattactaaaagagattgaagacgtgtataagaaagcgcaagcgtttgatgaaatacttgaaggtttacctaatgctatgcaagatgcactcaaagaagatattggtcttgatgaagcagtagggattatgacggggcaagtggtctataaatatgaggaggagcaggaaaatgaagaaatttaatgttcaaatcacatataccggcatgattgaagagactatcgaggctgaaagtttagaagaagcagaatttgaggcggatgttattgcgagattggaagcgccatttgattgtgatgagtatgaaattaatgtagaggaggaacaggaaaatgactaacacattacaagtgaaactattatcaaaagacgctagaatgcccgaacgaaatcataagacggatgcaggttatgacatattctcagccgaaaccgtcgtactcgagccacaagaaaaggcagtgatcaaaacagatgtagccgtaagcataccagagggctatgtcgggctgttaactagccgtagtggtgtaagtagtaaaacacatttagtgattgaaacaggcaagatagatgcgggatatcatggcaatttagggattaatatcaagaatgatgcacaagtatatttaacaactaacgaacagtgttttgatatacaaggagaaatggaaaattcttttgtaaataatgctaagaaaaaaccttttactataaatgattattacgaaatatataaaggcgacaaactagcacaactggttatcgtacctatatggacacctgaactaaagcaagtggaggaattcgagagtgtttcagaacgtggagcaaaaggcttcggaagtagcggagtgtaaagacatcttagatcgagtcaaggaggttttggggaagtgagagaacgcactaaaattatatatcgtggttggaataaggagatatttattttacagggtaaaaatatgaatgttattggtttgcgccaaatatttgatgaactcaaaagatcgtatgaaggttataaaatcgttgttattccaatagaagttgattttgaaatcaaataaataggagtgatgagaagtgacacaatacttagtcacaacattcaaagattcaacaggactaccacatgaacatattactgtggctagagataatcagacatttacagttgttgaggcagagagtaaagaagaagcaaaagagaagtacgaggcgcggaacgtgccagttgatggagcaaccaacttaaacgatatcaaatcaaatattggtatctttcatgttgaaaaagtcgaaccaaacgagggtatggtggacattaacattgagacaatgaaaccattcgaggaggcagatgatgattaacatacctaaaatgaaattcccgaaaaagtacactgaaataatcaaaaaaatataaaaataaaacacctgaagaaaaagctaagattgaaaatgattttattaaagatattaatgataaagacagtgaattttacagtcctatgatggctaatatgaatgaacatgaactaagggctatgttaagaatgatgcctagtttaattgatactggagatgacaatgatgattaaaaaacttaaaaatatgaattggttcgatatctttattgctggaatactgcgattattcggcgtaatcgcactgatgcttgttgtcatatcgcctatctatacagtggctagttaccaaaacaaagaagtacatcaagggacaattacagataaatataacaagagacaagataaagaagacaagttctatattgtattagacaacaaacaagtcattgaaaactccgacttattattcaaaaagaaatttgatagcgcagacatacaagctaggttaaaagtaggcgacaaagtagaagttaagacgattggatatagaatacactttttaaatttatatccggtcttatacgaagcaaagaaggtagataaacaatgattaaacaaatattaagactattattcttactagcaatgtatgagctaggtaagtatgtaactgagcaagtatatattatgatgacggctaatgatgatgtagaggcgccgagtgacttcgcaaaaatcagagctgaagtttcatggtaatagctattatcatttttgaattaattatattaatgtgtttagcaatagcactggaggtgttgtaaatatgtggattgtcatttcaattgttttatctatatttttattgatcttgttaagtagcgtttctcataagatgaaaaccatagaagcattggagtatatgaatgcttatcttttcaagcagttagtaaaaaaataatggtgttgaaggtttagaagattatgaaaatgaagttgaacgaattagaaaaagattcaaaagctaaagagaggcgttggcttctctgctctatctaaaataatgaaaggagccgaacatgttagacaaagtcactcaaatagaaacaattaaatatgatcgtgatgtctcatattcttatgctgctagtcgtttatccacacattggactaatcacaacatggcttggtctgactttatgcagaagctagcacaaactgttagaactaaagaagatttaactgagtacaataaaatgtctaagtctgaacaagccgatataaaagatgttggcggatttgtcggcggatatttaaaagaagggaaacggcgtgctggtcaagtcatgaatcgttcaatgttaacacttgatatcgattatgctgctcaagatatgacggacatattatctatgttttatgattttgcatattgtttatattcaacacataagcatagagagataagtccaagactgcgtttagtgattcctttaaaacggaatgtaaatgcagatgagtatgaagctattggacgtaaagtggcagatatcgttggcatggattacttcgatgatacaacttatcaaccacataggttaatgtattggccttcaactagcaatgatgcagaatttttctttacctatgaagatttacctttgttagacccagataaaatattaaatgaatatgttgattggactgacacattagaatggccaacgtcttcaagggaagagagtaagactaaaagattagcagataagcaaggcgacccagaagaaaagccgggaattattggtgcattttgtagagcctatacgatagaagaagctatagaaacttttattcctgacttatacgaaaaacattctactaaccgatatacctatcatgaaggctcaactgcaggtggattggtgttatacgaaaacaacaagtttgcctattctcatcataatacggatcccgtaagcggtatgcttgtgaacagttttgatttagtacgcatacacttatatggtgctcaagatgaagaaactaaaacagatactccggttaatcgactacctagttataaagcaatgcagcaaagagcgcaaaatgatgaagttgttaaaaaagcaattaattaatgacaaaatgtctgatgcaatgcaggatttcgatgaaatagaaaatagcgatgatgcatggtctgaaacgttagaaattacttcgaaaggtactttcaaagctagtatcccaaatatagaaattatattgcgtaatgatccaaatttaaaaggaaaaatagcctttaacgaatttacgaaacaaattgaatgtttagggaaagtgccatggaatactaattttaagacacgtcaatggcaagacggtgatgatagcagtttaagaagttatatcgaaaagatttatgacatacaccattcaggcaaaacaaaagatgccattataagcgtagcaatgcaaaatgcctatcatccagtaagagattatctaaataaaatatcgtgggatggacataaacgtcttgaaaagttatttatcaaatacttaggtgttgaagacactgaagtgaatagaacaactaccaaaaaggcattgactgctggaatcgctcgagtaatggagccaggatgtaaatttgactatatgcttacactttatggtcctcaaggtgtaggtaaatctgctttgctaaaaaaaattaggtggtgcatggttttctgacagtttagtttctgttacaggtaaagaagcttatgaggccttacaaggcgtttggctaatggaaatggcagaacttgcagctacaagaaaagctgaagttgaagctattaagcatttcatatctaaacaagttgaccgatttcgtgttgcttatgggcattatattgaagattttccaaggcaatgtattttcattggtacaactaataaagttgatttcttaagagatgaaactggtggaagacgtttttggccaatgactgtaaatccagagagagttgaagtgaactggtctaaactaaccaaagatgagattgaccaaatatgggcagaagctaaatactattatgaacaaggagaagagttgttccttaaccctgaactagaagaagaaatgcgttcaatccaaagtaaacatactgaggaatctccatatacaggtattattgatgaatatcttaacacgccaatcccaagcaattgggaagacttgagcatctttgaaagaagacgattttatcaaggtgatgttgatatgttaccaacaggaaatgtagattacgttgaaagaaataaggtctgtgcgcttgaagtgtttgttgaatgttttggtaaggataagggagatagtagaggatctatggaaattagaaagatttcaaacatcttaagacaattagacaattggtctgtatatgatggtaataaaagtgggaaaattcgattcggaaaagattatggtgtacagatagcgtatgtaagagatgaaagtttagaggatttaatataagaaatattgaataaatatacatttttagatgttgtatcaaatgttgcatcatttttttgagtgatgcaacacggtggtgtaaaaagtaatcttaggtgttgtatcatttttggtgatgcaacattgatgcaacaaatgatacaacacctctttcccttctcgctgtagggttcaaccctgtttgtttccaatgttgcatcaaattcactataaagtttaaaaagtagtgttagggagtaaaggggtataggggtaaccctctaacagctatttttaaaagtttggcaagaattgatgcaacattggaacacaaatataaattttgtatacaaggtgaatatatgaaagagtcgacattagaaaaatatttagttaaagagataacaaagctaaacggtttatgtttaaaatgggttgcacctggaacaagaggtgtaccagatagaattattattatgccagaaggaaaaacattttttgtagaaatgaagcaagaaaagggaaagttgcatcctttacaaaaaatatgtgcatagacaatttgaaaacagagatcatacagtatatgtgttatggaataaagaacaagtaaatacttttataagaatggtaggtggaacatttggcgattgacttcaaaccacatagctatcaaaagtatgcaatagataaagttattgataatgagaaatacggtctattttttagatatgggactagggaaaacagtgtcaacacttacagcatttagtgaattgcagttgttagacactaaaaaaaatgttagtcatagcaccaaaacaagttgctaaagatacatgggttgatgaagttgataagtggaaccatttaaatcatctgaaagtgtctttaatcttaggaacacctaaagaaagaaatgatgcattaaacacagaggctgatatctatgtaaccaataaagaaaatactaaatggttatgtgatcaatataaaaaaagaatggccatttgacatggttgtaattgatgaactgtctacatttaaaagtcctaagagtcaaaggtttaaatctattaaaaagaaattaccactcattaatagatttataggattaacaggaacacctagtccaaatagtttacaggatttatgggctcaagtttatttgatagacagaggcgaaagacttgagtcttcattcagtcgttatcgagaaaggtactttaaaccaacacatcaagttagcgaacatgtttttaactgggagctaagagacggatctgaagaaaagatatatgaacgaatagaagatatatgtttaagcatgaaagcgaaagattatctggatatgcctgacagagttgatactaaacaaacagtagtcttatctgaaaaagaaagaaaagtatatgaagaattagaaaaaaactatattttagaatcggaagaagaaggaacagttgtagctcagaatggggcatcattaagtcaaaaactacttcaactagctaacggtgcagtttatacagatgatgaagatgtaagacttatacatgataagaagttagataagttagaggaaattatagaggagtctcaaggccaaccaatattattgttttataacttcaaacatgataaagaaagaatacttcaaaggtttaaggaagcaaccacattagaggattcaaactataaagaacgttggaatagtggagacattaagctgcttatagcacatccagcaagtgcagggcatggattaaacttacaacaaggtgggcacattattgtttggtttggacttacatggtcattggaattataccaacaagcaaatgcaagattatatagacaaggacaaaatcatacgactattattcatcacatcatgaccgataacacaatagatcaaagagtatataaagctttacaaaataaagaactaacgcaagaagaattaatgaaagctattaaagcaagaatagctaagcataagtaatggaggtctaacatggggaacacaatatatgatatcaagccaggaacatttaaatatattgaatcagaaatatataatttaaatgagaacaagaaagaaataaaaagattgaggttggaaatacttaatccaacgaaggaacaagattccaatattgtatatggaccattacaaaaaggcgaaccagttagaacaactgaactaatggcaactagattattaactaataagatgttacgaaaccttgaagaaatggtcgaagcagttgagagtgaatacttaaagttgcctgaagatcataagaaagtaataaggctcaagtattggaataaagaaaagaagttaaagatggaacagataggacatgaatgccatatgcatcgtaatactgttactactatacgaaagaactttgttaaagcggtagcgtatcatgcaggtatcaaataacattgtgcaaagattgtgcaaaaggcctacaaatctgtagtaatatgatagtatcggaaagatgtataaagttatctaaaagttatacgacataagtaaacgaggcacatcgctatgcggtgtgtcttttgttatgcaatcaaagaggtgtaagagatgaccaagcataataacatttataagcatggtcgtaagtcatatcaatacgattggttctatcattcaaaagcatggaagaagttaagagagatagcattagatagagataattatctttgtcaaatgtgtttacgcgaagatattgtaacagatgcaaacattgtacatcacattatttatgttgatgaagattttaacaaagctttagacttagataatctaatgtcagtttgttatagctgtcataacaaaattcatgcaaatgataatgacaaaagtaatcttaagaaaattagagttctaaaaaatttaaataaaaaaattatttaaataaaattttatgcccccctgcccatcggcttaaaatgttttttcgccgggtaccggagaggcccaaacgctagcaacgcggataaatttttcatgaaagggggtctttatatgaagttaacaaaaaaaacaagctaaaagaatatatagaagattacaaaaaaatctgatgacatattaattaatttgtatatagaaacatatgaattttattgtcggttaagagatgaacttaaaaatagtgatttaatgatagagcatacaaacaaggctggtgcgagcaatattattaagaatccattaagcatagaactgacaaaaacagttcaaacactaaataacttactcaagtctatgggtttaactgcagcacaaagaaaaaagatagttcaagaagaaggtggattcggtgactattaaagttttaaatgaaccttcaccaaaactattaacaacatggtatgcagagcaagtcactcaagggaaaataaaaacaagcaaatatgttagaaaagaatgtgagagacatcttagatatctagaaaatggaggtaaatgggtatttgatgaagaattagcgcatcgtcctattcgatttatagaaaagttttgtaaaccttccaaaggatctaaacgtcaacttgtattacagccatggcaacattttattatcggcagtttgtttggttgggttcataaagaaacaaaactgcgcaggtttaaagaagctttgatatttatggggcgaaaaaaatggtaaaacaaccactatttctggggttgctaactatgctgtatcacaagatggagaaaatggtgcagaaattcatttgttagcaaacgtaatgaaacaagctaggattctatttgatgaatctaaggcgatgattaaagctagcccaaagcttgataaaaatttcagaacattaagagatgaaatccattatgacgcaacgatatcaaaaattatgccccaagcatcagatagcgataagttagatggattgaatacacacatggggattttttgatgaaattcatgaatttaaagactataaattgatttcagttataaaaaactcaagagctgcaaggttacaacctcttctcatctacattacgacagcagggtatcaattagatggtccacttgttgatatggtagaagcgggaagagacaccttagatcaaatcatagaagacgaaagaacttttttattatttagcatctttggatgatgacgatgatattaatgattcgtcgaactggataaaagcaaatcccaacttaggtgtctctataaatttagatgagatgaaagaagagtgggaaaaagctaagagaacaccagctgaacgtggagattttataaccaaaaggtttaatatctttgctaataatgacgagatgagttttattgattacccaacactccaaaaaaaataatgaaattgtttctttagaagagctggaaggcagaccgtgcacgattggttatgatttatcagaaacagaggactttacagccgcgtgtgctacttttgcgttagataatggtaaagttgcagttttatcgcattcatggattcctaagcacaaagttgaatattctaacgaaaaaataccctatagagaatgggaagaagatggcttattaacagtgcaagataagccttatattgactaccaagatgttttaaattggataattaagatgaatgagcattatgtagtagaaaaaattacttatgatagagcgaacgcattcaaactaaatcaagagttaaaaaaattacgggtttgaaacggaagaaacaagacaaggagctttgaccttgagccctgcattgaaggatttaaaagaaatgtttttagatgggaaaataatatttaataataatcctttaatgaaatggtatatcaataatgttcagttgaaactagacagaaacggaaactggttgccgtctaagcaaagcagatatcgtaaaatagatggctttgcagcatttttaaacacatatacagatattatgaataaagttgtttctgatagtggtgaaggaaacatagagtttattagtattaaagacataatgcgttaaggaggtgaatgttatcgcaaaagagaatattgtcacacgcataaagaaaaaattgatagacaattggattgatcagtcaacttctaagctttatgactttagcccatggaaaaatagatctttttggggtgtaattaataatacgcttgaaactaatgaaacgatattttcagctattacaaagttatctaattcgatggctagtttgcccttgaaaatgtatgaagattataaagtagttaatacagaagtatctgatttacttacagtgtcaccgaataattctctgagcagttttgattttattaatcaaattgaaacaatcagaaatgaaaaaggtaatgcatatgtgctaattgaacgagacatctatcatcaaccatcaaagcttttcttattaaatccagatgttgttgaaatgttaattgaaaaccaatcacgtgaactttattattccattcatgctgcaactggaaataaattgattgttcataatatggacatgttgcattttaaacacatcgtggcatctaatatggtgcaaggcattagtccgattgatgtgttgaagaatacaactgattttgataatgcagtaagaacctttaatcttacagaaatgcaaaaaacctgattctttcatgcttaaatatggttccaatgtaggtaaagaaaaaaaggcagcaagtgttagaagatttcaaacagtactatgaagaaaacggtggaatattattccaagagcctggtgttgaaatcgaaccgttacctaaaaaaatatgtctctgaagatatagtggcaagcgagaatttaacaagagaaagagtagctaacgtttttcaattgccctcagtattcttaaatgcaagatcaaatacaaatttcgcgaaaaaatgaagagttaaacagattttacttgcagcataccttattgccaatcgtcaaacagtatgaagaagaatttaatcggaaactacttactaaaacagacagagaaaaaaataggtattttaaatttaacgttaaatcttatttaagggctgatagtgcaacacaagcagaagtgtactttaaagcagttcgtagtggttactacactataaatgacattagagagtgggaagatttaccaccagttgaaggtggagataagccgctaataagcggtgatttatacccaattgacacgccacttgaattaagaaaatctttgaaaggtggtgataaaaatgtcaatgaaagctaagtattttcaaatgaaaagaaaatcaaaaagtaaaggtgaaatatttatttatggtgatattgtaagtgataaatggtttgaaagtgatgtaactgctacagatttcaaaaataaactagatgaactaggagacatcagtgaaatagatgttcatataaattcatctggaggcagtgtatttgaagggcatgcaatatacaatatgctaaaaaatgcatcctgcaaaaattaatatctatgtcgatgccttagcggcatcaattgctagtgttatcgctatgagtggtgacactatttttatgcacaaaaatagttttttaatgattcataattcatgggttatgactgtaggtaatgcagaagaattaagaaagacagcggatttacttgaaaaaacagatgctgttagtaattcagcttatttagataaagcaaaagatttagatcaagaacacttaaaacagatgttagatgcagaaacttggcttactgcagaagaagccttgtctttcggcttgatagatgaaattttaggagctaatgaaatagctgctagtatctctaaagagcaatataagcgtttcgagaacgtcccagaagatttaaagaaagatgtagacaaaatcactaaaattgatgatgtagatacatctgaattggttgaaacacctaaagaaagtatgtcactagaagaaaaaagaaaaaaagagaaaaaaattaaacgcgaatgcgaaattttaaaaaatgacaatgaattattaggaggaaatgaaatgccgacattatatgaattaaaacaatccttaggtatgattggacaacaattaaaaaaataaaaaatgatgaattgagtcagaaagcaacagatccaaatattgatatggaagacatcaaacaactagaaacagaaaaagcaggtttacaacaaagatttaacattgttgaaagacaagtgcaagacattgaagagaaagaaaaagcgaaagttaaagataaaggagaagcttatcaatctttaagtgataatgagaagatggttaaagctaaggcagagttttatcgtcacgcgattttaccaaatgaatttgaaaaaccttcaatggaggcacaacgtttattacacgctttaccaacaggaaatgattcaggtggagataagctcttaccaaaaacactttctaaagaaattgtttcagaaccatttgctaaaaaccaattacgtgaaaaagctcgtctaactaacattaaaggtttagagattccaagagtttcatacactttagacgatgatgatttcattacagacgtagaaacagcaaaagaattaaaagcaaaaggtgatacagtcaagttcactactaataaattcaaagtatttgctgcaatttcagatactgtaattcatggatcagatgtagatttagtaaactgggttgaaaacgcactacaatcaggattagcagctaaagagcgtaaagatgccttagcagtaagtcctaaatctggattagaacacatgtcattttataatggatctgttaaagaagttgagggagcagacatgtatgatgctattattaacgctttagcagatttacatgaagattatcgtgataacgcaacaatttatatgcgatatgcagattatgtcaaaattattagtgttctttcaaatggaacaacaaatttctttgacacaccagcagaaaaagtatttggcaaaccagtagtatttacagatgcagcagttaaacctattgtgggagatttcaattattttggaattaactatgatggaacaacttatgacactgataaagatgttaaaaaaaggcgaatatttgtttgtattaacagcatggtatgatcagcaacgtacattagacagtgcattcagaattgcaaaagcaaaagaaaatacaggtccattacccagctaagccccaaaaggttaatgtaacagctaaggctaaatcagctgtaatatcagccgaataggggtgatgaaatgagtttagaagaaattaaattgtggttgagaattgactataatttcgaaaatgatttaattgaaggtctcattcaatcggctaagtctgaattactattaagtggggttccagattatgacaaagatgacttggaatacccgctttttttgtacagcgattaaatatatcattgcaagagattatgaaagtcgtggatactcaaatgaccaatctagaagcaaggtgtttaatgaaaaaaggattgcaaaaaaatgattttgaaattaaaaaaagtggtaggtgatttttaaatggaatttaatgaatttaaagatcgcgcgtattttttttcaatatgtaaataaagggccgtatccagatgaagaggaaaaaaatgaaattgtatagttgcttttgtaaaatatataatccttctatgaaagatagagaaattttaaaagcgactgaatcaaagtcaggactaaccataattatgaggtcttctaaaattgaatatctaccacaaacaaatcacttagttaaaattgacagaggcttatattccgataaattattcaacattaaagaaataagaattgatacaccagatattggctataatacagtggttttatcagaaaaatgagtgtagaaattaaagggatacctgaagtgttgaagaaattagaatcggtatacggtaaacaatcaatgcaagctaagagtgatagagctttaaatgaagcatctgaatttttttataaaggctttaaagaaagaattcgagagttttaaagatacgggtgctagcatagaagaaatgactaaatctaagccttatacaaaagtaggaagtcaagaaagagctgttttaattgaatgggtaggccctatgaatcgcaaaaacattattcacttgaatgaacatggttatacaagagatggaaaaaaaatatacaccaagaggttttggagttattgcaaaaacattagctgctaatgaacggaagtatagagaaattataaaaaaggagttggccagataaatgaatatattaaacaccataaaaggaattttattatctgatgcagagctcaaaacacatataaattctagaatatactattacaaagtcactgaaaacgctgaaacttccaagccctttgttgttattacacctgtttatgatttgccttcagactttatgtctgataaatatctcagtgaagaatacttaattcaaatagatgtagaatcttcaaataatcagaaaacaattgatataacaaaacgaataagatacctgttatatcaacaaaatttaattcaagcatctagtcagttagatgcttattttgaagaaactaaacgttatgtgatgtcgagacgatatcaaggcatacccaaaaatatatattataaaaatcagcgcatcgaataggtgtgcttttttaatttttaaggaggaaataagcaatggcagaaggacaaggttcttataaagtaggttttaaaagattatacgttggagtttttaacccagaagcaacaaaagtagttaaacgcatgacatgggaagatgaaaaaggtggtacagttgacctaaatatcacaggtttagcaccagatttagtagatatgtttgcatctaacaaacgtgtatggatgaaaaaacaaggtactaatgaagttaagtctgacatgagtattttcaatattccaagtgatgatttaaacacagttattggacgtactaaagataaaaaatggtacatcttgggtaggagagaatacaagagcaccgtatgtaacagtaattggcgaatcggaagatggtttaacaggtcagccggtatatgtagccttacttaaaggtacttttagtttagattcaattgaatttaaaacacgaggtgaaaaagcagaagccccagaacctacaaaattaacaggtgactggatgaatagaaaagttgatgttgatggaacgtcacaaggtattgtatacggttatcatgaaggtaaagaaggagaaacagaattcttcaaaaaaagtattcgttggatacacggacagtgaagatcattcagaggattctgcaggttcgttacccagctaatccccaaaatgttgaagtagcagttaattcaaaatctgcaacagtttcagcagaataggggctttcaaaataaatcaaaggagaataatttatgactaaaactttaaaggtttataaaggagacgacgtcgtagcttctgaacaaggtgaaggcaaagtgtcagtaactttatctaatttagaagcggatacaacttatccaaaaggtacttaccaagtggcatgggaagaaaatggtaaagaatctagtaaagttgatgtacctcaattcaaaaccaatccaattctagtctcaggcgtatcatttacacccgaaactaaatcaatcacggtaaatgctgatgacaatgttgaaccaaacattgcaccaagtacagcaacgaataaaacgttgaaatatacaagtgaacatccagagtttgttactgttgatgagagaacaggagcaattcacggtgtagctgagggaacttcagttatcactgctacgtctactgacggaagtgacaagtctggacaaattacagtaacagtaacaaatggataattatttgagacgcagaatatctgcgtctttttttatttgaataaaaggagctaatacaatgattaaatttgaaattaaagaccgtaaaacaggaaaaacagagagctatacaaaagaagatgtgacaatgggcgaagcagaaaaatgctatgagtatttagaattagtaaatcaagagaataaaaaagaagcacctaacgcaacaaaaatgagacaaaaagagcgacagttattagtagatttatttaaagatgaaggattgactgaagaagatgttctgaacaagatgagtactaaaacttatacaaaagccttacaagatatatttcgagaaatcaatggtgaagatgaagaagattcagaaactgaaccagaagagatgggaaagacagaagaacaatctcaataaaagacattttatcgaatattaagaaaatacaacgtttctgtatggagcagtatgggtggacattaactgaagtcagaaaacagccgtatgtaaaacttttagaaatacttaatgaagagaataaagaagagactgaagaaaaaacaaagtgaacaaaaagtcattacaggtacggatttaagaaaactttttggaagctagaaaggaggttaatatgaatgaaaaagtagaaggcatgaccttggagctgaaattagaccatttaggtgtccaagaaggcatgaaaggtttaaagcgacaattaggtgttgttaatagtgaaatgaaagctaatctgtcagcatttgataagtctgaaaaaatcaatggaaaaaatatcaggcgagaattaaggggttaaatgataggcttaaagttcaaaaaaaagatgtattctcaagtagaagatgagcttaaacaagttaacgctaattaccaaaaagctaaatccagtgtaaaagatgttgagaaagcatatttaaagttagtagaagccaataaaaaaagaaaaattagctcttgataaatctaaagaagccttaaaatcatcgaatacagaacttaaaaaaagctgaaaatcaatataaacgtacaaatcaacgtaaacaagatgcgtatcaaaaacttaaacagttgagagatgcagaacaaaagcttaagaatagtaaccaagctactactgcacaactaaaaagagcaagtgacgcagtacagaagcagtccgctaagcataaagcacttgttgaacaatataaacaagaaggcaatcaagttcaaaaaactaaaagtgcaaaatgacaatctttcaaaatcaaatgataaaattgaaagttcttacgctaaaactaatactaaattaaagcaaacagaaaaaagaatttaatgatttaaacaatactattaagaatcatagcgctaatgtcgcaaaagctgaaacagctgttaataaagaaaaagctgctttaaataatttggagcgttcaatagataaagcttcatccgaaatgaagacttttaataaagaacaaatgatagctcaaagtcatttcggtaaacttgcaagtcaagcggatgtcatgtcaaagaaatttagttctattggagacaaaatgacttccctgggacgtacaatgacgatgggcgtatctacaccaattactttagggttaggtgcagcattaaaaacaagtgcagactttgaaggccaaatgtctcgagttggagcgattgcgcaagcaagcagtaaagacttgaaaagcatgtctaatcaagcagttgacttaggagctaaaaccagtaaaagtgctaacgaagttgctaaaggtatggaagaattggcagctttaggctttaatgccaaacaaacaatggaggctatgccaggtgttatcagtgcagcagaagcaagtggtgcagaaatggctacaactgcaactgtaatggcttcagcgattaactctttcggtttaaaagcatctgatgcaaatcatgttgctgatttacttgcgagatcagcaaatgatagtgctgcagatattcagtacatgggagatgcattgaagtatgctggtactcctgcaaaagcattaggagtttcaatagaggacacttccgcagcaattgaagttttatctaactcaggtttagagggttctcaagcaggtactgccctaagagcttcatttatcaggctagctaatccaagtaaaaatacagctaaggaaatgaaaaaattaggtattcatttgtctgatgctaaaggtcaatttgttggcatgggtgaattgattagacagttccaagataatatgaaaggcatgacgagagaacaaaaactagctacagtggctacaatagttggtactgaagcagcaagtggatttttagccttgattgaagcgggaccagataaaattaatagctatagtaaatccttaaagaattccaatggcgaaagtaaaaaaagcagcagatttgatgaaagataatctcaaaggcgctctggaacaattaggtggcgcttttgaatcattagcaatcgaagtcggtaaagatttaacgcctatgattagagcaggagcggaaggtttaacaaaattagttgatggatttacacatctccctggttgggttagaaaagcttcagtaggattagcactttttggtgcagcaattggacctgcagttcttgctggagggttattaatacgtacagttggaagtgctgctaaaggatatgcgtcattaaatagacgtattgctgaaaatacaatcctttcaaatactaattcaaaagcaatgaaatctttaggtcttcaaacattatttcttggttctacaacaggaaaaacgtcaaaaggctttaaagggttagccggagctatgatgtttaatttaaaacctataaatgttttgaaaaattctgcaaagctagcaattttaccgttcaaacttttgaaaaacggtttaggattagctgcaaaatctttatttgcagtaagtggaggcgcaagatttgcgggtgtagccttaaggtttttaacaggacctataggtgctacaataactgctattacaattgcgtataaagttttttaaaaccgcatatgatcgtgtggaatggttcagaaacggtattaacggtttaggagaaactataaagttttttggtggtaaaattattggcggcgctgttagaaagctaggagagtttaaaaaactatcttggaagtatcggcaaaagcttcaaagaaaagttttcaaaagatatgaaagatggttataaatcattaagcgacgatgaccttctcaaagtaggagtcaacaagtttaaaggatttatgcaaaccatgggcacagcttctaaaaaaagcgtctgatactgtaaaagtgttagggaaaggtgtttcaaaagaaacagaaaaagctttagaaaaatatgtgcattattctgaagaaaatagcagaatcatggaaaaagtacgtttaaactcgggtcagatatcagaagacaaagcaaaaaaaacttttgaaaattgaaacggatttatctaataaccttatagctgaaatagaaaaaaagaaataaaaaggaactcgaaaaaaactcaagaacttattgataagtatagtgcattcgatgaacaagaaaagcaaaacattttaactcgaactaaagaaaaaaaatgacttgcgaattaaaaaaagagcaagaactcaatcagaaaatcaaagaattgaaagaaaaaagctttgagtgatggtcagatttcagaaaatgaaagaaaagaaattgaaaagcttgaaaatcaaagacgtgatatcactgttaaagaattgagtaagactgaaaaagagcaagagcgtattttagtaagaatgcaaagaaacagaaatgcttattcaatagacgaagcgagcaaagcaattaaagaagcagaaaaagcaagaaaagcaagaaaaaaagaagtggacaagcaatatgaagatgatgtcattgctataaaaaataacgtcaacctttctaagtctgaaaaagataaattgttagctattgctgatcaaagacataaagatgaagtaagaaaagcaaaatctaaaaaagatgctgtagtagatgttgttaaaaaagcaaaataaagatattgataaagaaatggatttatccagtggacgtgtatataaaaaatactgaaaagtggtggaatggccttaaaagttggtggtctaactttagagaagaccaaaagaaaaaaaagcgataaatacgctaaagaacaagaagaaacagctcgtagaaacagagaaaatataaagaaatggtttggaaatgcttgggacggcgtaaaaagtaaaactggcgaagcctttagtaaaatgggcagaaatgctaatcattttggcggcgaaatgaaaaaaaatgtggagcggaatcaaagggattccaagcaaattaagttcaggttggagctcagccaaaagttctgtaggataccacactaaggctatagctaatagtactggtaaatggtttggaaaagcttggcaatctgttaaatcgacaacaggaagtatttacaatcaaactaagcaaaagtattcagatgcttcagataaagcttgggcgcattcaaaatctatttggagaggcacatcaaaatggtttagcaatgcatataaaagtgcaaagggctggctaacggatatggctaataaatctcgcgcgaaatgggataatatttctagtacagcttggtcgaatgcaaaatccgtttggaaaggaacatcgaaatggtttagtaactcatacaaatctttaaaagattggactggggatatgtattcaagagcccacgatcgttttgatgcaatttcaagttcggcatggtctaacgctaaatcagtatttaatggttttagaaaatggctatccaaaacatatgattggattagagatattggtaaagacatgggaagagctgcggctgatttaggtaaaaatgttgctaataaagctattggcggtttgaatagcatgattggcggtattaataaaatatctaaagccattactgataaaaatctcatcaagccaatacctacattgtctactggtactttagcaggaaagggtgtagctaccgataattcgggagcattaacgcaaccgacatttgctgtattaaatgatagaggttctggaaacgccccaggtggtggagttcaagaagtaattcacagggctgacggaacattccatgcaccccaaggacgagatgtggttgttccactaggagttggggatagcgtaataaatgctaatgacactctgaagttacagcgtatgggtgttttaccaaagtttcatggaggtacgaaaaagaaagattggctagaccaacttaaaggtaatataggtaaaaaagcaggagaatttggagctacagctaaaaacacagcgcataatatcaaaaaaaggtgcagaagaaatggttgaagcagcaggcgataaaatcaaagatggtgcatcttggttaggcgataaaatcggcgatgtgtgggattacgtacaacatccagggaaactagtaaataaagtaatgtcaggtttaaatattaattttggaggcggagctaacgctacagtaaaaatagctaaaggcgcatactcattgctcaaaaaagaaattagtagacaaagtaaaatcgtggtttgaagatttcggtggtggaggcgatggaagctatctatttgaatatccaatctggcaaagatttggacgctacacaggtggacttaactttaatggcggtcgtcactatggtatagactttggtatgccttctggaacaaacgtttatgccgttaaaggtggtatagcagataaggtatggactgattacggtggcggtaattctatacaaattaagactggtgctaatgaatggaactggtatatgcatttatctaagcaattagcaagacaaggccaacgtattaaagctggtcaactgatagggaaatcaggtgctacaggtaatttcgttagaggagcacacttacatttccaattgatgcaagggtcacatccagggaatgatacagctaaagatccagaaaaatggttgaagtcacttaaaggtagtggcgttcgaagtggttcaggtgttaataaggctgcatctgcttgggcaggcgatatacgtcgtgcagcaaaacgaatgggtgttaatgttacttcgggtgatgtaggaaatattattagcttgattcaacacgaatcaggaggaaatgcaggtataactcaatctagtgcgcttagagacatcaacgttttacagggcaatccagcaaaaggattgcttcaatatatcccacaaacatttagacattatgctgttagaggtcacaacaatatatatagtggttacgatcagttattagcgttctttaacaacagatattggcgctcacagtttaacccaagaggtggttggtctccaagtggtccaagaagatatgcgaatggtggtttgattacaaagcatcaacttgctgaagtgggtgaaggagataaacaggaaatggttatccctttaactagacgtaaacgagcaattcaattaactgaacaggttatgcgcatcatcggtatggatggcaagccaaataacatcactgtaaataatgatacttcaacagttgaaaaaattgttgaaacaaattgttatgttaagtgataaaggaaataaattaacagatgcattgattcaaactgtttcttctcaggataataacttaggttctaatgatgcaattagaggtttagaaaaaatattgtcaaaacaaagtgggcatagagcaaatgcaaataattatatgggaggtttgactaattaatgcaatcttttgtaaaaatcatagatggttacaaggaagaagtaataacagattttaatcagcttatatttttagatgcaagggctgaaagtccaaacaccaatgataacagtgtaactattaacggagtagatggtattttaccgggcgcaattagttttgcgccttttttcattagtattaaggtttggctatgatggtatagatgttatagatttaaatttatttgagcattggtttagatctgtgtttaatcgcagacatccttattatgttattacttctcaaatgcctggtgttaaatatgcagtgaatacagctaatgttacatctaatttaaaagatggttcttcaactgaaattgaagtaagtttaaatgtttataaagggtattctgaatcagttaattggaccgatagcgagttcttattcgactctaattggatgtttgaaaatggaattcctcttgatttcacacctaaatatactcatacatcaaatcaatttactatttggaacggttctactgatacgataaatccacgattcaagcacgatttgaaaatattaattaatttaaatgcgagtggaggatttgaactggttaactatacaacaggtgatatttttaagtacaacaaaagtatagataaaaacactgattttgttttagatggtgtgtatgcatatcgagatataaatagagtgggaattgatacaaatagaggcattataacattagcgccaggtaaaaaatgaatttaagattaaaggagacgtcagtgatattaaaactacatttaagtttccttttatttataggtaggtgatttaatggattatcatgatcatttatcagtaatggattttaatgaattgatttgtgaaaatttactagatgtagattatggttcttttaaagaatattatgaactgaatgaagctaggtacatcacctttacagtttatagaactactcataatagttttgtttttgatttattgatttgtgaaaacttcataatttatcatggtgaaaaatatacaattaagcagacagcgccaaaggttgaaggtgataaagtttttattgaagttacggcatatcacataatgtatgaatttcaaaatcactcagtggaatcaaataagcttgatgacgacagtagcgaaactggtaaaacgccagaatactctttagatgagtacttaagatatggatttgcaaatcaaaaaaacttcggtcaaaatgacctataaaataattggagattttaagcgaaaagtaccgattgacgaattaggtaacaaaaacggcttagaatactgtaaagaagcggtagacctgtttggctgtataatttacccaaatgatacagagattggtttttattctcctgaaacattttatcaaagaagcgagaaagtgattcgatatcaatataatactgatactgtatctgcaactgtcagtacattggaattaagaacagctataaaagtttttggaaaaaagtatacagctgaggaaaagaaaaattataatcctattagaacaactgacattaaatattcaaatggttttataaaagaaggtacttatcgtaccgaaacaattgggtctaaagctactattaactttgattgcaagtatggtaatgaaacagttagatttacaataaaaaaagggctctcaaggtggaatatataagttgattttagacggcaagcaaattaagcaaatttcttgttttgctaagtcggttcagtctgaaacaatagatttaataaaaaatattgataaaggcaagcacgttttagaaatgatatttttaggagaagaccccaaaaatagaattgatatatcttcaaataaaaaaagctaagccttgtatgtatgttggaactgaaaaaatcaacagtcttaaatttaattgctgataattcaggtcgcaatcaatacaaagcaattgtcgactacgtcgcagatagtgcaaagcagtttgggattcgatatgctaatacgcaaacaaatgaagatatcgaaacacaggataagctgttagaatttgcaaaaaaagcaaataaatgatactcctaagactgaattagatgttaattatataggttatgaaaaaatagagccaagagatagcgtattttttgttcatgaattaatgggatataacactgaattaaaggttgttaaacttgataggtcacatccatttgtaaacgcaatagatgaagtgtctttcagcaatgaaataaaagatatggtacaaattcaacaagcacttaacagacgagttattgcacaagataatagatataactatcaagcaaatcgtataaatcatttatacactagtactttgaattctcctttcgagacaatggatatagggagtgtattaatataatggcaacagaagaagttaaaatcaaagcgctacttgaaaacgataaacagtactttccagctacacactggaaagctataaatgggataccttatgcaggcagtagtgatattgatggattgcctcaagacggtatcatttcggtagatgataaaaataaattagataaattaaaaataggcgaagcaggaattattcaaaatagcattgtacagaaatccccaaacggtaaattgtggaaaataacagttgacgatagtgggaaacttggtacagtgctattttattagaaaggaaggtgcattatggaaaatttgtatttaataaaggatttgggagctttagcaggtcgagattatagagctaaagaaattcaaaacctgcaaagaatagagcaatttgcgcttggcttgacaacagagtttaagttgcatcagaaagctaaaacaatgcaacacttcgctgagcaaatttattataatggtagatcgcaagcagcagtaaacaaatctttacaaagtcaaattaacgcacttgttgtggcaccacgtaataacagtgctaatgagattgttcaagctcgagttaatgtaaacggcgaaacctttgacacattaaaagaacatttagacgattgggaaaccaaaactcaaattaataaagaggaaactataagagaattaaataagaccaaacaagaaattcttgatatcgagtatcgttttgaacctgataagcaagagtttttatttgtgacagaacttgcacctcttacaaatgcagtaatgcaatccttctggtttgataatagaacaggcatagtatacatgacacaagctagaaataatggctatatgctaagtcgtttaagacctaatggtcaatttatagacagctcattgattgtaggtggggggtcatggtacacataacggttatagatatattgatgatgagttatggatttatagttttatcttaaatggtaataatgagaatacattagttcgtttcaagtatacgcctaatgtggaaattagctatggcaagtatggtatgcaagatgtatttacaggacacccagaaaaaccctacatcacccctgtcataaatgaaaaaagaaaataaaattctatacagaattgagagacctagaagtcagtgggaacttgaaaactcaatgaattatatagagataagaagtttagacgatgttgataaaaatattgataaagttttgcataaaatcagtatccctatgagactaacaaacgaaacccaaccaatgcagggtgtgacttttgatgaaaaatacttgtattggtatacaggagacagtaatccaaataatagaaactatttaacggctttcgatttagaaacaggagaagaagcgtatcaggttaatgctgactatggtggaacactagattcatttcctggcgaatttgcggaagcagaaggtttgcaaatatactatgacaaagatagtggtaaaaaaagctttgatgctaggtgttactgtcggtggtgatggaaatagaacacatcgtattttcatgattgggcaaagaggtattttagaaatacttcactcaagaggcgttccttttatcatgagtgacacaggtggtagagttaaacctttaccaatgaggcctgataaacttaagaatcttgggatgttaacagagccaggtctttactatttatacactgatcatacagttcaaatcgatgatttcccattaccaagagaatggcgtgatgcaggttggttcttggaagttaagccaccacaaactggcggtgatgtaattcagatattgacgcgtaatagttatgcaaggaatatgatgacttttgaaagggtgctttctggaagaactggagacatttcggactggaattatgtgcctaaaaatagtggtaaatgggagagagtaccttcattcatcacaaaaaatgtcagatattaacatagtaggcatgtcgttttatttaactacggatgatacaaaacgttttacagattttccaactgaacgtaaaggggtagctggttggaacttatatgtagaagcttcaaacacaggtggctttgttcataggctagttcgtaatagtgttacagcatctgctgagatactattgaaaaattatgatagtaaaacaagttcagggccatggactttacacgaagggagaattataagttaatgagtaatttagagaaatctgtagctataaatttagaaaacacagcgcattatgaaaatatttcaaatctagatataacttttagaacaggagagagtgattcttctgttcttctttttaatatcattaaaaataatcaaccgttattactgagtgaagaaaatatcaaagcacgaatagcgattcgaggtaaaggagtaa

SEQ ID NO: 5 - DNA, 40763 bp, Bacteriophage F86/06
gttttcttctcaaaaaattccctttatctatgtttttttagtaggaggtgctaatttatggcgggtagacctaagaagcttttgtcaaattcgaacaagaattatacaaaagaagaaattattgaaaaagagcgtcaagaagctcaattaaataaattttctaaaatcgatactgaaccaccgcactttttagatgaaatagcgaaacaagaatacttaagaatattaccgcacatgcaagaattgccaatttccaacttagataaagcacaattagcacaatattgtagtttttatagtgactttgttaaagcaagtttgattttagagcgcgaagacttgattttagaagacgacaaaggaaatcaaaaggttaatccggcgttcaacataaaggaaaaagcgggtattcgattgcaacaaacagctaatactttaggattaactattgatagccgattgcgtattatggttcctgatgaaaaagaagatgatgatccatatatggaatttgtgagtgattagtaatgactgattatgttactaaatacgcaaaaaaggtagtttcaggagaaattttggcaagtttgaagaatattcaagtatgtaaacgtcacctatcttttatggagaacccgccgaatggttgccattgggataatcatttgtctaacaaagcaattaaatttgtggaaatgcttccagaccctaaaacaaaccagcccatgcctcttatggagtttcagaaattcattgttgggagcttatacggctggcgtagaggtcaatacagaatgtttactaaagcttatataagtatggctagaaaacaaggtaagtctctaatcgtatcgggaatgtccgttaacgaactgttgtttggacaataccctaaatttaatagacaaatttatgtagcttcatctacttataagcaagcgcaaacaatattcaagatggcaagccaacaagtaaacctaatgcgaagtaaaagcaagtttatccgtgaaaaaacagacgtaagaaagacagacattgaagatgtattaagtagttcagtgtttgcacctctttccaataacccagatgcggttgatggtaaagatcctacagttgctattttggacgaattggcaagtatgcctgatgatgagatgtactcaaggtttaaaacaggtatgacattacaaaaaaatcctttaaccctacttgtttcaacggccggagacaatttaaatagtcaaatgtaccaagagtataagtatattaaacgtattttaaatgaagaagtaagagctgataattattttgtatattgtgctgaaatggattcacaagaagaagttcaagatgaaacaaagtggattaaagcaatgccacttttagaatcaaaagaacatagaaaaactatacttcaaaatgtaaaagctgatatacaagacgaattagaaaaagggacatcgtatcataagattttgattaaaaacttcaatttatggcaagcgcaaagagaagatagcttgctagatatttcagattgggaacaagtaataacgcctatgcctaatatcaatggtaaagatgtgtatataggtgtcgacttatcgagattggatgacttaacatctgtagggtttattttccctaacgacgataaaaaagtgtttttacatagtcattctttcattggattaagaacaaacttagaacaaaaatctaagagagacaaaataaattatgaattagcgattgaacgtggagaagctgagactacacaatcagatagcggcatgattgattataaacaagttatcgattttatagtgaaatttataacgacgcatgacctgaatgtacaggctgtttgctatgacccttggaatgcgcaaagttttataacaacaatcgaatcaatggctttagattggccactcattgaagtgggacaaagttttaaggcgttatcacaatctattaaagaatttagaatgtgggttgcagatgaaagaatacagcataacgataatatgttacttacaacatcagttaataatgccgttttgattcgtgacggagaagacaatgtgaaaataaataaaaaaatgaatcgtcaaaaaatagatccgattatttcgattatcacagctttcactgaagctagaatgcacgaattccaagaaaattggacggagaaatatgaaagcgaagaattcggattttaaaggtggtgacaaaatggacttgaataaaataaatgtcttttttaatttcttggttgctaatttggttagcatcctttttttattaggtttgtttgtggttaatgtttctatgtataaagcattcggtcaaaatataggacttttatgcattggtataacactgattgttatttcgttgattttaaatcatgaaagcaatcaagaaaggagttagtagttgtggggattttttataaaaatgaaaaacgagacttgcaatacaacgaagatgatttgcaaatgatggttcaaactttgccaggttttcaaggaacaaaattacgacaatataaagatatagaagcaattaggcatagcgacatctttactgcagttatgatgattgcttctgatttggcgcgcatgccaattagggtgacagtgaacggccaaattaattatagtgacaggattgttaatttgttaaatacacgtcctaacccaatgtataacggctatatattcaaattagtagtgtttgttagtgccttactaacatcgcacggctatattgaaattacacgtgataaaacaggagaacctatgaatttaacgttcagaaagacatccgaaatagaattgaaatcagacgcaagaggtcgactgtattattttcatcaaaggatagacagtaacggaaataatatagaacgtaatgttaagtttgaggatatgctagacatcaaattttattcgttggatggtataaatggtttgtcactgttagacacattaagtcgcacgatagaatcagataacaatggaaaagatttccttaataatttcttgcgaaatggcacacatgctggtggtattttgaaaatgaaaggtgtattagataataaaaaagcaagagaccgtgccagagaagaatttcacaaaagttttagtggaactaaacaagctgggaaagttgtcgtactcgatgaatcaatgacgtttgatcaattagaagttgatacagaagttttaaagcttatcagagaaaacaaatcatcaacaagagaaatagcaggtgtatttggtattccattgcataagttcggcatagaaacagcgaacatgagtatcacggatgctaatttagattacttatcaactttaaaaccttatattacatgcgtttgtgcagaattgaattttaagtttaatgatgaatatgtgaatcgtgaatttaaatttgataccactgaaatacgagttgttgatgaaaaaacacaagctgaaattgacaaaattaacattgattctggaaagatgaatatcgatgaaattagacaacgtgatggattagcgccaataccaggcggtaatggtagcattcacagagtcgatttaaaccatgtaaatattgaacttgtagatgagtatcagatgaataaatcgagagctactgataaaaaattgaaaggtggtgaggaaaatgagtaaggaaacgagagttggcaacattattgaggtacgctcaaatgataacaacgaaatggtcatagaggggtatgcgttaaagtttgacacttggtctgaaaatcttggtggattcaaagaaacgatttcacgtcgcgctttagaaaacactgatttatctgatgtacgttgtttagtagatcatatcccatcgcaaataattggtaggacaaaatcgggtactttggagctcgaaactgatgatgttggacttaaatatcgttgtaagttaccaaacacaacatttgcacgtgatttatatgagaacatgcgtgtaggcaacatcaatcaatgttcgtttggttttatgcttgacgataaaggcgatgaagtgcgttttgatgaacaagaaaacatttacaaacgtactttaacagcaattcgtgaacttacagatgtttctgtagtgacttatccggcttacaaagacactgatgttaaaccagcattacgtagtattgaaaccgttaaaaaagaacaacgtaaaaaagaattagaaataagactaaagaaacactctatattaaataatatttggtgaagttgaacaccattatcaaatacagccattggacatgctgaatatagcgatgtctatttttttatgccaattttaggaggaaattaaatgaaaacaaaagaagagttacaatctgagatttcagacattaaaagacaaattgatttaaaggtgaagtatgcaacgagagcacttaataacgatgagttagaaaaagcagaaaaattagaacaagaaattactgatttacgttctcaaatccaagaaaaacaagaagaattagataagctaaaagaaaaagatggaacttcagaaaacaatcaacaatcagtggaagtaaacgaagcacgtacttatcgaaaccaagcaaacattaatgatttaggtatttcgattcaaaacacaaaggtaacatcacaagaagttagagattttactgaatatcttgaaacacgcaatgatattcaaggtggttcgttaaaaacagactcaggatttgtagttattccagaggaaattgttacagatattttaaaattaaaagaggttgagtttaatcttgataagtatgtgacggtcaaacgtgttacaaatggttctggtaaatatccggtagtacgacaatcagaagttgcagcccttgaaaaagttgaagaattagaagaaaaccctgaattagcagttaaaccattcttccaattagcatatgacattaatacacaccgtggttacttccgaatttcacgtgaagcaatcgaagatgcaaaagtgaatgttttgcaagaattgaaactatggatggcgcgaactattgcagcaacacgaaacaaagcaattattgatgttatcactaaaggatcaacgggttctacaagttcaggttttgaaaaagaaggtaagaaattagaagttaaaaaagcaaaatctttagatgatattaaagatgctattaacctgaatgttaagccaaattacgaacataatgttgcgattgtttcgcaaactatgtttgcaaaattagacaaaatgaaagataagctaggaaactatttaatccagccagatgttaaagaaaaaacgcaacagcgtttattaggagctaaaatcgaaattttacctgatgaagtactagggcaaaaaggtaataacactttgattatcggtaacttaaaagatgcgattgttttatttgaccgctctcaataccaagcatcatggactgactacatgcatttcggagaatgtttaatgattgctgtacgtcaagactgtagaattctagattataaatcagcaattgtgattgaatatgatgatagtgaacgcggtgaaggcgatcttggcttagaagcataataagcgctcgatactttataaagaggtgataaactatggcaatgtatgaagtgaagaaatcttatactgacttggaaaaaggccagtatttaaagtcaggtaaacgtgttgaaatgacagtaaaacgtgctgaatatgttaacaaaaagctgaaagagcatggagtaatacttgaaagagtaaaagaagaataggtgattgaatgcaattaacagctgaggaacttaagttattaaaaaagcattgcaaaatagatcacaattcagaggacgacttattagaaatatattactcttgggcattccatgaaatagctagcgctgttacggatgaaccaagtaaatatattgattggtttaaaagtcatcctctatttgctcgtgctatataccctttagcaagttactattttgaaaaccgtattgcttatttggatagggatttatcgcttgcgccacatatggttttaagtacggtgcataaattgagaggttcatttgagcaatttttggagagtgaaaatgatgaaatttaattccaataaattaaatgaacgtatagatttttgtgaagatgtaagcgagagagtgaacggaaatccgatgaaaccgaagacgaaaatattatactcttgtttcgcttgcattcaagaatctaaagaatccgacactcaaacgaatctcaatacaggtagcaaattcattaaaactattattatcagagatacacgaggtgattataaaccaacaaataagcattacgtcttgcatgaagggcaaagatttaacatcaaatatgtaaagccagattatcaagataaatcttatttgcgtatctatggcgaggtggtcatttaatgggggcaagaattgaaagtaataacattgaacaaggtttgaaaaatgcagttttaaaaatgaatttaaatagtaatgtaattgtcaaagctggggctatgtcattagtcccgcttttaaaaagcaatacgccttttgcagatactaaaaaacacgctcgtgatcacatagctgtttctaatgtgaaaacagacagagacacaagtgagaaaatcgttacaattggttacgctaaaggcgtctcacaccgtattcatgcaacagaatttggaacaatgtaccaaaaaccacaattgtttataacaaaaacagaaaagcaagggaaaaacaaagttttaaaaacaatgcttgatactgctaagaggttgcaaaaatgattaatgttaccaaaataattagaaacgctattattgcaaataacattacagatgaagtgaatgtgtttaactacactatagatgaccattttcacgaaaaaactgacaagcctattattcgtatatatcccttaccgttcaatcctgacacatacgctgatgataacgagatttcaagagaataccattaccaaattgatgtttggtggtctcaagatgaaccgaacgagcaagcagaaaaaattgttgagttactcaaagtgataaattttcaatgttattacagagaaccgttatacgagagtgacgtcatgtcattcagacatattataagagcaaaaggctcgattttatcaatgaaattggaggaaaattaaatgattgaaaaattgaaacaagcaccaagatttttaaaattaaacttacaacattttgcagatacaggagtttcgggtatcgcaattggggtatcaaacttttattatgcacctattttaaaagatacagaaaatgaatgggaaactggagctggcacacgtattcgtttcttaaaagaaattgaagtagaccgtccacaagataccgaggaagattatggagatgatatggtcgcagcaactgctgtatctaatggtaaactgagtgttaagacaacatttgttactgttcctgctgacgataaggcgttcttgaatggcgctaaaaaaggtgtaggtggttataaatatggagctaaggatattccgccagatgtagcgattgtatttgaaagacgtaatcatgatgagtcttcagaatgggttggcttgttcaaaggtaaattcactcgttcaagcatcaaagggcaaacgaaacaagataaggttgaattccaaaatgatgatgtagaaggtaactttattgatcgtttatttgatgaaagctcgcatgttacaggctatgataaaaaaggaagcactacagggcgcgattatgtattcatggaaacatttggtaaaacttatgatgaattcatgtctagtcgaggagaacaaaatatggaacctgtagaaaaagaaatgaaaaaaacagaaaaagttgaagtcacttctgtaaacgtcactgatgaacaagttacagttaaagttgatgctactaaacaactatcagccacaaccgaaccatctggacagaaagtaacttatgcagtgactgaggggcaaacgtatgctagcgtaacatcaactggtctcgttaaaggtttggcggaaggtaatgcgaccgttacagcgactgcaggaaagcaaactgatactgtgcaaattacagtacaatctaatttagaaatgtaagttttgagggcttaacgccctctttttattttggccaaattaaaaagaaagtaggaatttaataatggaacgtacatcaattgaattaattacaggatttacaaaaacaggaaagccgcaatatcaaaagtatttagcaaagccgattattactttgtttgaaacaattcaaggttcaaaattaggtttgaaacttaacaaagcctttaagggggctgattttaaagatctaacagaagaagaatttaataacttaagtgtgacagaacaggaagaatacaaaaacaagcaagaagaatacgaaaacaacatggctgtacaaatggaagtattggaagaagttttggatttcatcgttgaagcttttgataatcaatttactagtatagaacttcaaaaaggattaccaaatggtcaagaaggtattgaaaagattggacagttaattggacgcattacaggtggggaacctagcgatacaaaaaagttcgtgacagagaatcagaaataagaaaagaagatttaacacctgaagctgtctacaacaattacaggaaaatagctaaagatttgatagaaaacggcatggatgcagaaaaagtggctaacatgccgatacacttctttttagacattgtcgaatcgaagattgaaacaaagcgaactgcgaaaagttttaaagatattttttaatcagcctttaaaggttgattttttatttacatcttggaagaaaggaggtttttaaatgcctaatcctataggtaatatggtcataaaggttgatttagatggttctggattcaatagaggtgtgacaggtttaaataggcaaatgaaaatggtttcgcgtgagctttcggctaatttatcacaattttctagatatgataattcattagaaaagtcgaagataaaagtcgaaggtttgagtaaaaaacaaaaagttcaagcccagattactaaagagctgaaagatagttatgacaaacttagtaaagaaactggtgaaaacagtgcaaagacacaagctgcggctgctaaatacaatgaagcttacgctaaattaaaccaatatgagcgagagttaaaccaagccacacaagaattaaaagacatgcaaagagagcagaaagcattaaatactgcaatgggaaaacttggtaccaactttaataattttggtcctaaacttcaagaaattggtaacagtatgaaaaatgtaggccgtaacatgactatgtatgtaactgcgccggtggttgctgggtttgctgtagcagctaaaaaaggtattgaattcgatgacagtatgagaaaagttaaagcaacttcaggtgctactggtgaagagtttgaagctttgaagaaaaaggctcgcgaaatgggtgcaacaacaaaatttagcgcatcagattcggctgaagcattaaattacatggcacttgctggttgggattctaagcaaatgatggaaggtttaagcggagttatggatttagcggcagcatctggcgaagaactgggagcagtaagtgacattgttacagatggactaacggcatttggtttaaaagcaaaggatagtggtcattttgcggacgttttagcacaaactagctcgaaggcaaatacggatgttagagggctcggagaagcttttaaatatgtcgctcctgtagcaggtgcgttaggttacacgattgaagatacatctattgcgataggtttaatgagtaatgctggtatcaaaggtgaaaaagcaggtacagcgttacgaacaatgttcaccaatctttcaagtccgactagagctatggggaatgaaatggagcgcttaggaatatctattacagatagtaatgggaaaatgattcctatgcgaaagcttttagaccaactgagagaaaaatttaaacatctttcaaaagaccaacaagctagttctgcagctacaatatttggtaaagaagcgatgtcaggagcattagcaattataaatgcttctgatgaagactatcaaaagttaaccaaatctatagattcatctaccggcgcatctaaaagaatggccgatacaatggaatctggtttaggtgggaaattaagaactttaaggtcgcaattagaagaactagccttaacgatttatgacagaatagaaccagcactaaagattatagtaagtgcttttagcaaagtagtgacatgggttactaaattaccaacgtcaattcaattagcggttgttgggtttggattatttgcagcagttttaggtcctttagtttttatgttcggtttatttatcagcgtgatggggaatgcaatgacagttttaggacccttgttaataaacgttaataaagctggtggtatattcgcgtttttaagaactaaaatcgcatcacttgttaaactatttccgattttaggtgtgtcgatatccagtttaacgttacctataacattaattgtaggtgcattagttggtattggcatagctttctatcaagcttataaacgttcagaaacttttagaaatattgtaaatcaggcaatctctggtgtagcaaacgcatttaaagcagctaaactagcgttacaaggtttctttgatttattcaaaggtgatagtaaaggcgcggttaccctagagaagatatttccacccgaaactgtagcaggaatacaaaatgtagttaatacgattagaacaactttctttaaagtagttgatgcaatcgttggtttcgccaaagagataggcgctcaattagcctctttctggaaagagaacggctcagaaataacacaagctttgcaaaatatagctggtttcattaaagcaacctttgaatttatttttaactttattattaaaccaatcatgtttgcgatttggcaagtgatgcaatttatttggccggcggttaaagccttgattgtcagtacttgggagaatataaaaggagtaatacaaggtgctttaaatataatacttggctttattaagttcttttcaagtttattcactggtaattggcgaggtgtttgggacggtattgtaatgatactgaaaggtactgtgcagttaatttggaatttaatacaactgtggtttgtaggtaaaattctaggtgtagtgagatactttggtggattacttaaaggtttaatatccggtatctggagtgttatcaaaggtattttcacaaaatctttatcggcaatttggaatgcgacgaaaagtatttttggtttcttatacaatagtgttaaatctattttcactaatatgaaaaactggttatctagtacgtggaataatatcaaaagcaataccgtcggcaaggctcattcgttatttacgggtgtaaggtctaaattcacaagtttatggaatgcgacgaaagatatatttactaaattaagaaattggatgtcaaacacctggaactctattaaagacaatacagtaggtatagctggtcgtttgtgggataaagtacgtaatatattcggaaacatgcgtgacggtttaaaatctatcattggtaaaattaaagatcatatcggtggtatggtagatgctattaaaaaaggacttaataaattaattgaaggcttaaactgggtcggtggtaagttaggtatggatgaaatacctaggttacacactggtacagagcacacacatactactacaagattagttaagaacggtaagattacacgtgacacattcgctacagttggggataagggacgcggaaatggtccaaatggttttagaaatgaaatgattgaattccctaatggtaaacgtgtaatcacaccaaatacagatactacggcgtatttacctaaaggttcaaaagtatataacggcgcacaaacttattcaatgttaaatggaacgcttccaagatttagcataggtactatgtggaaagatattaaatccggtgcatcatcggcatttaactggacaaaagatcaaataggtaaaggtacaaagtggcttggcgataaagttggtgatgtcatggactttatcgataatccaggcaaacttttaaattatgtacttcaagcgtttggagttgatttcagttctctaactaaaggtatgggtattgctggcgatataacaaaagctgcatggtctaagattaagaaaagtgcaatcaagtggcttgaggatgctttcgcagagtcgggtgatggcggtgtattagatatgaataaattacgttacttatacggtcacactgctgcttatacacgagaaaccggacgcccattccatgaaggtctggattttgattacatttacgaacctgttccatcaaccattaatggtagagcacaagttatgccttttcataatggtggttatggaaaatgggtgaaaattgtaaagggcgccttagaagttatttatgcacatttatctaaatataaagttaaaactggtcaacaagttagggtcggccagactgttggtatatcggggaatacggggtttagtacaggacctcacttacattatgagatgcgttggaatggaagacatagagacccgttaccgtggttaagaaagaataatgggggcggcaaaagtacacccggtggtaatggtgcagctaatgctagacgagctattaaggctgctcaaaatattttaggaggaaggtataaggcgagttggattactaacgagatgatgcgtgttgcgagtcgtgaatccaattatacagctaatgcagtcaataattgggatagcaacgcaagagctggtataccttcaagaggtatgttccaaatgatagatccttcatttagagcgtacgcaaagtcgggttacaataatcctctcaacccaactcatcaagctatatcggctatgagatatattgtgggtaaatgggtaccaagaacaggctcatggagagctgcgttcaaacgcgctggtgattacgcatatgctactggtggcaaagtctataacggattgtaccacttaggggaagaaggatatccagagtggataatacctactgatccaagtagagcgaacgaagcacacaaattattagctttagctgctaacgatattgataaccgctctaaaaataagcgaccaaacaacttaccaaatccaagtataagtaatagtgatacaaactatattcatacattggagaataaactggatgcggttattaattgtttggttagtttggttgagtctaatcaagttattgcagataaggattacgaaccagttattaataagtatgtgtttgaagatgaggtaaataattctatcgataaacgagagcgtcacgaatctacaagagttagatttagaagaggaggcacgataatctaatgcaagatacaattcaaatagacaataaaaccattgaatggttagttgtacaaagagggtttgagataccctcttttaattttgttactgaaaaagaaagtgtgaaaggtagaacaggttctattgctaaagctcgttatctaaatgatatcgaatttgaattacctctaataattagaaatgaagtcttggcgccaggtggacaaaaaacgcatgacgatatattggaagagttagttgaattttttgatattgacaatttaaagccgaaaaaacttaaattcaaatctcaaaactggtattggtttgcatactttgatggaccattaaaattaccgaaaaacccaagaggttcagtgaagttcactatcaaagtagtactaacagacccttacaaatattcagtaacaggaaataaaaatactgcgatttcagaccaagtttcagttgtaaatagtgggactgctgacactcctttaattgttgaagcccgagcaattaaaccatctagttactttatgatcactaaaaatgatgaagattattttatggttggtgatgatgaggtaaccaaagaagttaaggattacatgcctcctgtttatcatagtgagtttcgtgatttcaaaggttggactaagatgattactgaagatattccaagtaatgatttaggtggtaaggtcggcggtgactttgtgatatccaatcttggcgaaggatataaagcaactaattttcctgatgcaaaaggttgggttggtgctggcacgaaacgagggctccctaaagcgatgacagattttcaaattacctataaatgtattgttgaacaaaaaggtaaaggtgccggaagaacagcacaacatatttatgatagtgatggtaagttacttgcttctattggttatgaaaataaatatcatgatagaaaaataggacatattgttgttacgttgtataaccaaaaaggagaccccaaaaagatatacgactatcagaataaaccgataatgtataacttggacagaatcgttgtttatatgcggctcagaagagtaggtaataaattttctattaaaacttggaaatttgatcacattaaagacccagatagacgtaaacctattgatatggatgagaaagagtggatagatggcggtaagttttatcagcgtccagcttctatcatagctatctatagtgcgaagtataacggttataagtggatggagatgaatggattaggttcattcaatacggagattctaccgaaaccgaaaggcgcaagggatgtcattatacaaaaaggtgatttagtgaaaatagatatgcaagcaaaaagtgttgtcatcaatgaggaaccaatgttgagcgagaaatcgtttggaagtaattatttcaatgttgattctgggtacagtgaattaatcatacaacctgaaaacgtctttgatacgacggttaaatggcaagatagatatttatagaaaggagatgagagtgtgatacatgttttagattttaacgacaagattatagatttcctttctactgatgacccttccttagttagagcgattcataaacgtaatgttaatgacaattcagaaatgcttgaactgctcatatcatcagaaagagctgaaaagttccgtgaacgacatcgtgttattataagggattcaaacaaacaatggcgtgaatttattattaactgggttcaagatacgatggacggctacacagagatagaatgtatagcgtcttatcttgctgatataacaacagctaaaccgtatgcaccaggcaaatttgagaaaaagataacttcagaagcattgaaagatgtgttgagtgatacaggttgggaagtttctgaacaaaccgaatacgatggcttacgtactacgtcatggacttcttatcaaactagatatgaagttttaaagcaattatgtacaacctataaaatggtattggatttttatatagagcttagttctaataccgtcaaaggtagatatgtggtactcaaaaagaaaaacagcttattcaaaggtaaagaaattgagtatggtaaagatttggttgggttaactaggaagattgatatgtcagaaatcaaaacagcattaattgctgtgggacccgaaaacgacaaaggaaagcgtttagagttagttgtgacagatgacgaagcacaaagtcaattcaacttacctacccgttatatttggggaatatacgaacctcaatcagatgatcaaaatatgaatgaaacacggttgcgttctttagccaaaacagagttaaataaacgtaagtcggcagttatgtcatatgagattacttctactgatttggaagttacgtatccgcacgagattatatcaattggtgatacagtcagagtaaaacatagagattttaacccgccattgtatgtagaggcagaagttattgccgaagaatataacataatttcagaaaatagcacatatacattcggtcaacctaaagagttcaaagaatcagaattacgagaagagtttaacaagcgattgaacataatacatcaaaagttaaacgataatattagcaatatcaacactatagtaaaagatgttgtagatagtgaattagaatactttgaacgcaaaatacacaaaagtgatacaccgccagaaaatccagtcaatgatatgctttggtatgatacaagtaaccctgatgttgctgtcttgcgtagatattggaatggtcgatggattgaagaaacaccaaatgatgttgaaaaattaggtggtataacaagagagaaagcgctattcagtgaattaaacaatatatttattaatttatctatacaacacgctagtcttttgtcagaagctacagaattactgaatagcgagtacttagtagataatgatttgaaagcggacttacaagcaagtttagacgctgtgattgatgtttataatcaaattaaaaataatttagaatctatgacacccgaaactgcaacgattggtcggttggtagatacaaaaactttatttcttgagtatagaaagaaattacaagatgtttatacagatgtagaagatgtcaaaatcgccatttcagatagatttaaattattacagtcacaatacactgatgaaaaatataaagaagcgttggaaataatagcaacaaaatttggtttaacggtgaatgaagatttgcagttagtcggagaacctaatgttgttaaatcagctattgaagcagctagagaatccacaaaagaacaattacgtgactatgtaaaaacatcggactataaaacagacaaagacggtattgttgaacgtttagatactgctgaagctgagagaacgactttaaaaggtgaaatcaaagataaagttacgttaaacgaatatcgaaacggattggaagaacaaaaacaatatactgatgaccagttaagtgatttgtccaataatcctgagattaaagcaagtattgaacaagcaaatcaagaagcgcaagaagctttaaaatcatacattgatgctcaagatgatcttaaagagaaggaatcgcaagcgtatgctgatggtaaaatttcggaagaagagcaacgcgctatacaagatgctcaagctaaacttgaagaggcaaaacaaaacgcagaactaaaggctagaaacgctgaaaagaaagctaatgcttatacagacaacaaggtcaaagaaagcacagatgcacagaggaaaacattgactcgctatggttctcaaattatacaaaatggtaaggaaatcaaattaagaactacaaaagaagagtttaatgcttctaaaagaacactatcaagagtgttagcagacatcactgtaaatgctatgaaaggcatctatttaaggtatgacgaaaatggggcgattacttcacatactattgataaagatggcgtgaaaattagtggcgataaagttgatataacagcgaatagagaatttaatgtagtcgcaaataatattaataacaaagttggtaaaaatgacattgttaatagcctaaacttatcaaatgaaggtcttgacatcaatgtgaatagaattggtattaaaggcggaaatgctaaccgttatgtacaagttcaaaatgattttattgaacttggcggaatcgtacaacgaacttggaaaggcaaacgatcaaccgatgatatattcacacgtcttaaagatggacatctaaggtttagaaataataccgcaggcggttcactttatatgtcacattttggtatttcaacatatattgatggagaaggcgaagacggaggttcatccggtactattcaatggtgggataaaacttacagtgatagcggtatgaatggcataacaatcaattcttatggcggtgtagtcgctttaacatctgactacaaccgaattattatcgattcatatgcttcagctaatattgaaagtagagaagcaccgatatatttatctccgaacaccaaaaataaacctggtttaaaccgattcgcattcacattatcaaacgctgatagtgcatacgaaactgacggttatatcatgtttggttcagatgaaaactataagtacggtgctggattaagattttctaaacgtagcaataaaggattggttcaagtcgttaatggtgactatgctacaggcggagacactacaattgagtcaggtatgggcaaattcaacatagttaaacgaagagatggaaatagttacgttagcattcaaagttatgatttattggcggtaggttctgataatgctggcgatagagtcgcttctaattctatttataagcgtacttattcagcacctgctaacttacacattacttctgctggaacaattgggcgtgctacttctgccaaaaagtataaaatttcaatcgaaaatcaatacatcaatgaagacgatcagttcagtcattcaaaagagattttaaagcttccaattcgtacatggtttgacaaatatgaatcggaaataatggctaaagaattggaaagtggtaaaaagttatctgatgatacttttaaacttagtcgacatactggcttaatagcggaagaggttgaagaattaggatttaatgaatttgttatttatgatgacaacggagaaatcgaaggtatcgcatacgatagactttgggttcatttaatacctattattaaaaaccagcaatcaaaaatcgaaaaactggaggaattaataaatgaatgatagcaatcaaggtttacaagccaatccacaatatacaattcactatttatcgcaagaaatcacaagactaacacaagaaaatgcaatgttaaaagcatatatacaagaacaaaatgaaaaaagcaaaagtgctgaggaagagtaatccttggcactatttttatacaaaaatttaaggaggtcatttaatatggcaaatgaaattatcaaaaaaacagagagatttattttagtacaaattgacaaagagggaacagagcgcgttttgtatcaagattttgtaggcagttttacaacgtccgattcagcaagttatgcacaagattttaaatctgaggaaaacgctaaaaagattgctgaaactttaaatcttttatatcaattaacagtcaatcaaaacggtgtgaaagttgtgaaagaagttgtggatagaactgacttgtcatctgataaatcagttgatagcgaaataatgtaactatactaagttatgagcattacgctcatagctttcttagaaagtaggtgtagttttggatgatattcagaaaataaaaaaagagctttctgaattagttgaacgtgttgatgatgttgaaatactagcaaacgaaacagctgatcatgtgcttgaacttagagaggaacataagcaacatcataatgaactaagagaatctcataaagaacttaaagataagcaagataaagttgtagatgagaatttagagcaaacaaagatattaaacagaattgaagaaagatatcaaacgcaagtagatgttgcgcaaaaaaatgaagaaaagacactcgcccaaaataaatggctcgtaggtgccatatgggcgcttgtaacaattgttatgattgcagtcattactgcatcaattactgcgttattaccttaagggaggtggacataatgagttgggcaagatggttatcatgttatttgtatggtcgtaaatgtaaataatgtttttggtcagtgcatcggcactggctttttatttattgttgtaattatggtaatatgcagaagtgagcaagttggatagatggtggctatctgagtataaggaggtggtgcctatgttggcattactgaaatctttagaaaggagatgcctaatgattacaattagtaccatgttgcagtttggtttattccttattgcattgataggtctagtaatcaagcttattgaattaagcaataaaaaataaccatcgctaactttggctggtttcgatggttaaatggttattaatttaatctttaatctaaaatagccaccgtctttttaacgggctcattagggtaacatgtttgcgcatgttgccctttttctatatataaattaacacaccataatataaatatcaaatagacggcttattagtcgtctttttattttgggtaaaaggagataagaatatgattaattggaaaattagaatgaaacaaaaatcattttgggtagcgatattgtcagctatctttttatttgctcaaaacatcgcaaaagctattgggtatgatatccaagtttatacagagcaattaacagacggtttaaacgctatattaggatttttagtattaactggtgtgattcaagacccgactactaaaggtataggtgatagccaccaagctttagaatatgaagaaccaagaagaaaatactaggaggtaaaataatgaaaacatacagtgaagcaagagcaaggttacgttggtatcaaggtagatatattgattttgacggttggtatggttaccaatgtgcagatttagcagttgattacatttattggttgttagaaattagaatgtggggaaatgcaaaagatgcaatcaataacgattttaaaaacatggcaacagtatatgaaaacacaccatcgtttgttccacaaataggtgatgtggctgtatttaccaaaggaatatataaacaatacggtcatattggtttagtgtttaatggtggtaatacaaaccaatttttaattttggaacagaactatgacggtaacgcaaatacgcctgcaaagttacgttgggataattattacggctgtactcactttattagacctaagtataaaagtgagggcttaatgaataagatcacaaataaagttaaaccacctgctcaaaaagcagtcggtaaatctgcaagtaaaataacagttggaagtaaagcgccttataaccttaaatggtcaaaaggtgcttattttaatgcgaaaatcgacggcttaggtgctacttcagccactagatacggtgataatcgtactaactatagattcgatgttggacaggctgtatacgcgcctggaacattaatatatgtgtttgaaattatagatggttggtgtcgcatttattggaacaatcataatgagtggatatggcatgagagattgattgtgaaagaagtgttttcattcttaggttaaaatgttaaatatttgttaattattttttaatgtaagtttagtttcttttaatattttattgatttttaatattttctcaatataaaatgaagttgttgatatttatcatcttaaataagggtgttagctataaaaagagataaataaaaacaaatatattatatttggaggaagcgccatgctcaaaagaagtttattatttttaactgttttattgttattattctcattttcttcaattactaatgaggtaagtgcatcaagttcattcgacaaaggaaaatataaaaaaggcgatgacgcgagttattttgaaccaacaggcccgtatttgatggtaaatgtgactggagttgatggtaaaggaaatgaattgctatcccctcgttatgtcgagtttcctattaaacctgggactacacttacaaaagaaaaaattgaatactatgtcgaatgggcattagatgcgacagcatataaagagtttagagtagttgaattagatccaagcgcaaagatcgaagtcacttattatgataagaataagaaaaaagaagaaacgaagtctttccctataacagaaaaaggttttgttgtcccagatttatcagagcatattaaaaaccctggattcaacttaattacaaaggttgttatagaaaagaaataaaacaaaatagttgtttattatagaaagcaatgtcttgcttgaatatgtgtagtgaaaattatctttcatcaaattctcattcatgcacgaatggctcttccccacctaatcagatattaggtgacttatggggagaaatcagttaggatgaaaaagtggataatcctttttttaggcaggtacttcggtacttgcctatttttttatgttataatctttctagacgtattcaaaggacgtctttttagattgtatgttatagctagctttcgggctagttttttgttatgatgcgttacacatgcatcaactatttacatctatccttgttcacccaagcatgtcactgggtgtttttttcttatgatagagagcatagttttcatactactccctcgtagtatatatgactttagcattcccatataatagtttacggggtgctttttatgttataattaactgtatatagtaggagtgaactatatagcctgttaagtggcctagtaacctaacacttatcctgcaattgatatcctttttgcccttcactcgatacatatatctcaacaacatagaaatattacagtcgctacaccgcatcttaaatggtgtggttatttttattggaagtgtgtatcaggtatcagtaatgttaaaacaccagctaaaaatgaaaagaattcaccagtgccagcaggttatacactcgataaaaacaatgtaccgtataaaaagagactggttattacacagttgccaatgttaaaagtaataacgtgagggatggctattcaactaattcaagaattacaggtgtattacccaataacgcaacgatcaaatatgacggcgcatattgcatcaatggctatagatggattacttatattgctaatagtggacaacgtcgttatatagcgacaggagaggtagacaaggcaggtaatagaataagcagttttggtaattttagcgcagtttgaaaaaaaagtgtgtaaagtttcatatgaagttaattaatttattatagaatagtttaaaattatgctataatcattttagacacagcaatgtgttcaaattttcatctattcataagctagccttcgggctagtttttttttgctatatatttgttttaattaaataaaattagataatgcaatagtagccattttatgttaatattaccttgggcgttttcaaggagcgcctttcattttttatgtattgctccccttcgggctagtatattaaatttatttttgcgctttccaaatcaatgtatatgtgttatattgtttatgggaagtaggtaagcatttcggtgcttacctttttttgtttttctataaatacaataaggtatgtcaatttgataatttattaattttcatttaataagaagatctatatagttaatgaataattaatgtacttttttttagttagtcattaaaataaattagtactaattactaaggagaataaaaaatgaaaattagaaaatctatacttgcgggaactttagcaatcgttttagcatcaccactagtaactaatctagataaaaatgaggcacaagctagcacaagcttgccaacatcgaatgaatatcaaaacgaaaagttagctaatgaattaaaatcgttattagatgaactaaatgttaatgaattagctactggaagtttaaacacttattataagcgaactataaaaatttcaggtctaaaagcaaatatttggtttctaattatttttgttttaacagtgcttgtatttaatcctttaattgttaaattcattatctggttaattaatgaaacaagaaagtttatgaatttggattgtataagcttattagacaaaagagacaagttgtttaataacaacggtaaaccagtatttatagttattaaagactttgaaaacagaatcattgaagagggtgaacttaaaacctataattcagctggtagcgatttcgatttactagaggttgagcgacaagatttcaaagtatctgatttaccgtcaaacgatgaattgtatattaaacatacacttgtagaccttaaacaacaaattaaattggatttatatttaatgaatgaatattaatcttttttcttagctttttctgataaagtgctttttaagttttcgctggcacccggcttttcaaaacttttgtttattgggttactacgagtagcttcttgttttttgtttttatccgccataaaattctcaccaccattcaacgtctacacttgtaggcgttttttgattagtaaaatcataatgaatcttctttggttaacttatcgccatctattttttgtgaaataaattccaagtatttacgcgcattatgtgacgataaatctttaggtaactcataagtgaatggttgattaccactagttaaaacttcatatactatagtttctctttttattttgcaattagttattttcattataaacttcctttcaaacactgctgaaatagacgtcttttttaaataagcataattaatacttcaattctttaatccacatatatttaaaagtgagatagtaggtaataaatataagacttaaagttaagattgcttttttcatgtttcataattaaaacctctgtaaatttaaggttagtattatgaaataatggattggtttattctttagtactaacttcgtagtaaattatatagttcgctaaattgtatttatctactatatttttggaataaacaatttccttttctttcttcagtaaattataaaaatctacatcattttcgttagctgattctattttggtgatatcagattgtctaacgattcttttagatctgtcaaggtatataaatttccctgatttagaattagtctttttattcacaccgacgtaaattgaaagtaatatactttttccaaaaacagcatcactgtgattatggttttcatcttctataactaagaatacatgtttttttgtaaaaatttttttgatcatcgttattattcctttattaaatttattaagtcttcttcatttaaaaattgaatttttgcaccatttccaacatattctcgagcttttcgttgttttgaaactagtccgttcacatctttatatttatcatcttgaacaccttcgactaaaatatctgtttttgcagttacgtcacttctgatataagctcctttctttctagttaatatcattaaatcttgtttttcagtgtcaaaattacctgtaaaaacaacatttttatcttttaaaatagggattacactttccacttctattttattaatctcagatattttcatatgaattttttgaaatcctgaatcgaaaagtttagttggagagttagaatatttgctaaatctaatgtattgcttaggcatataatgtattaattttaatacactataatgctgattgtttttagcgagtgatatcaacatcttcgataaagctagcacgtcaaatttagcagaatgtaatttttctttatcgatatcatataagctacacaaattttctaatttaaaactagagattgcgtggaagcttctaaagatatttatactatcgacatacatgaagtttggaacaggtaagtcataataattattagtattttttaatactgaaatatcaaaaagtgcattatgagcaataattaaatgtgattcttttaaaagatagagaatttcttggtaaatatctggatatttaggtgcttttaatatgacatcttcaggtattttatgtattttagcgtttttcaagttatatctattattaggaggattaatataagatgaataaacttttactattgataaatccttaattaaagatacagcaacttcgcaagggctgttcatatgttcattcatagtttcaaagtctaagactgcaatatcatattttttcatttgcaagtgctccttttataaaataacttttccaattaacctcacactttcatttctataaaagtgtagatcgtcgtaatctttatttagtgaaactagagtcaatctatcatcttcaacaaagactttcttaacgtacgcttcttcttcaatgatgaatataccaatttgtccattctttatattgtgagttttctccacaaatatgatttcgccatctttaaacataggttccatagaatcaccatttacttttaacgctaaatcgtgtgtggggataggtcctttaaccatttcagtaaatagcgtttcatcgtgtaaacgttctcctacaccagcagagacgcaaccattgacgttaactggagttttctcctgtttatatgaattaatatctacaacgttatctcctttagaattctgttcttccaattgttcatttgcatagttaagtacgttttcttggcggggaggtgtgagtttgttgtatatggaagtgatgtcgttatcgtctttgtatgtagtatctatgtcgcttttaccaacctcgaaaacatcagctatcctttgtataacgccgtgagaggggttggaacgtaaatttaaataatcgcttaaagtagatggttttatgttaatgagttcagcaagtttcttttgagacatatttgaatcgttgagaaattttctaatgtttttggctataataatatttctttctttgttcatattacttacctccttttttcttattatacgaaattttcatatcatagtaaagttttttacgaaaaaaacgtatttaatgttgacaatacgaaaatttcgtattatattaggtttacgaaaggcggtgacaacatgaaaacattaaaagagttgaggactgattacggattgactcaaaaagagttaggagatttatttaaggtctcatcacgtacaattcaaaatatggaaaaagactctacaaacattaaagatagtttactttctaagtatatgagtgcttttaatgttaaatatgatgatatttttttaggtaatgaatacgaaaatttcgtatttacgaatgataaaaagaaatcaattattttagcatttaaagaaaaacaaacatcttaataggaggaataacaaatgaacattcaagtagcaacgaagctagcgatggagaaaggaataagtataaggagagagaatcaagatgtgtatgggatattaccaactaatttgcagcgttatcaatgcctagtcgtgtctagacactataagaaaaaaagacaaaccgccgccggaaggtggcagcctagcgcagacgatttaatagcagatgattggattttagattattaattttttcaaatctctaattaaacccataagtgttttgtaatcttttttggattctgattctgagtaggcgataccttctcgagaaagagccatctcaagaaaaccgccatcttcagcagaagcaattacaaaatctctatgctttaattcaagaactgcatcgatatagtcttcaaaattaaaacctaaaaagaaagcgttaaatgaggattcatcactaccgaaataagatgcagaacgtttagacataccttcgtcaattctatcaaggtaaattgaataaagttgtaaaaggacaaatttagcttcatcagtcataagtcattcacctccttaataggagtatagcagaaaggagcacaaacaatatgcaagcattacaaacaaaatcgaacataggcgaaatgttcaacatacaagaaaaagaaaatggagaaatcgcaatcagcggtcgagaacttcatcaagcattagaggttaagactccatacaaaaaatggtttgaaagaatgagtgattacggatttgaagaaaatatcgattatatagtcacggacatttttgtccataacccactaggaggtcgtcagaatcaaactgaccacgcactcacactagacactgcaaaagagattgcaatgattcaacgtagtgaacctggcaaacgtgcaagacaatacttcatccaagttgaaaaagcatggaatagcccagaaatgattatgcaacgtgctttaaaaattgctaacaacacaatcaatcaattagaaacaaagattgaacgtgataaaccaaaaattgtatttgcagatgcagtagctactactaagacatcaattttagttggagagttagcaaagatcattaaacaaaacggtataaacatcgggcaacgcagattgtttgagtggttacgtcaaaacggattccttattaaacgcaagggtgtggattataacatgcctacacagtattcaatggaacgtgagttattcgaaattaaagaaacatcaatcacacattcggacggtcacacatcaattagtaagacgccaaaagtaacaggcaaaggacaacaatactttgttaataagtttttaggagaaaaacaaacatcttaataggaggaacgaacaatgcaagctcaaaacaaaaaagtcatttattactactatgacgaagccggtaatagacgacccgttaatattcaatacaacgatggctacgacttaatgatagacccgcgttttattgaaatgacgcttgaaagacatccgcatttaaaaaataacttttatggattaatagatggaaaagaatttaagttagattaaatttttggaaatgcaaaggaggcataacaaatgttacaaaaatttagaatcgcgaaagaaaaaaataaattaaaactcaaattactaaagcatgctagttactgtttagaaagaagtaacaaccctgaattgttgcgagcagttgcagagttgttaaagaaggttaactaaattaggccttattattactttttagaatgtgaacaataggtcgataaaaaacttaataaacaaactatagcaactatcaatgaattttgaatatgtaaatcgttctcgtttatatagtttgttacaaagatttgaatgtcagcacctgctgcaatgccattagaccatcttattaactttttgaaaggatgtggaaaatcattttcgatacgtttgacaaattcatcgtgtctcttgtaggtactttgctcatttattggataggtcgaattgatggcttcagccaaagtagagatagcagttggattgatataaaaatctctaatggtctgttgtgcttgaagtacaatctcatcatcaaacctatagagttccttaaaagattttatcgtttcttcagaaaataaatttctttgaaatgttagagatgaaaaagaattacgcaaattaaaattcatttcaattaagttgtttagatgaaagtctactttgaagtcagaaaataaatttatgttgtttctattaattatatctaattggtacttaggttttaaagattgtttaattgccatacttttagaaatttcaacattactaattacgttattaatagaaaaacgaacattttttaaaggatcaatatacaccaatatcacctcctttcactaggagataacaacattatacacgaaaggaaagatagaaatgccacatattttaaacgtaacagttccaatacctgaaacacatgtacttatcacaaaagatgaatatgatgagctaattggttattcattagaccctgtatggaacatgagtgacttaaagaagaaattaaaaattgcatctgatgagactatcaaggacagattactatttcatcctagatttgaaaaagaactaagagcgcaaggaattgtgcattacccagatgagaattttaatcgctggagatttaacgcaagaaagatgaataaattcgtcgatgagcatttcaatgaaatatataaggagagaataaaatgagcaacatttataaaagctacctattagcagtactgtgcttcacagtcttagcgattgtgcttatgccattgctgtacttcactacagcatggtcaattgcaggattcgcaagtatcgcaacattcatattctataaggaatacttttatgaagaatgaaaaaactgctacttgcgccaacaagtaacagtgacaaacgattaacaaaattaattcattttcaatataaaacgaaaaacggaggaagtcaactatgactaaaaattataaagacatgacgcaggaagaattaagagatttattggctgaaaagaatggagaattgtttgaagtagtgaatgaaatcaataaagaaactgaatttgccgttttacttttttcaactgtaggggttagcaatggagatactacatcatcgtcacattgtgcgcttggggatattgtaggtcttgctaatttattgaataacgaaaatgattaccacgatatcgctaatgttatcgaaatgtataaattaaaaaaacttttaggtctagctgacaacaaggaggacgagaatgatgtattacaaaacgggtgacgtatgtcaaaaaataattaatgtagatggctttgattttcgattaagagttaagaaacgagcatatagcgtcgaaatagttgttttagatcatgaggggaattcaattgacgggatactagtttctgacgagaacgatctatacacagcgttagatattttgaaacaaagtatttatgaatggattgaaaataacacagatgaacaggacaaactaatgaacttagtcatgaaatggtaggtataagcatgagagacacagaaagaaatatattgaatatttttaagacgttattcgacgaatatactttgtcaaaccaacgagcattattggaaattgaacgtaatcatcacggatacttatcgattaatttcctgcactatcacgacagttacaaaacaaacaataagcttgtgcagatacatgaaatcaatccagacagccatgaacgaataaaaaatttaattatcgaggtgctaagaggtcatcggaagattaaaaaaggagcatgaggaaagatatgaaaataaataagttaactatatcgaactttgctggaatcaaagaagtaacatttaactttgacggtaaagatgcaaaaatatacggcaataatgcgactggtaagactacaacagcaaccgcattacaatggctgcttttcgataaaggtttggacggatcaaccaaatcatttaaccctgtacctttaaacgaaaaaaacgcagaaaattatgagttaattccgactgttttcgcagaatttgaaatcgacggaaaaattacgacttttaaaaaagagtcacatcctaaatacacaataaatcaaaaaacgaatcgcaaggaatactcacgaagtcgaacgaagaaacaatatatcaatgatgaatcaataaaagtaaaggattataaagctcgtattgatgaactgattgatgaagatgtattcaagttaattacgaaccctcaagcatttaacttactagattggaagaagcgaagaagtttgttgtttgaaattgctaaaccaatcaatgatgaggatgtcattaaaacaaatgatgattttaaagaattaaataatattcttggagatcatgaaattgaaacaaagaaaaagattcttacggacaagataaaacagattaacaaagatatcaaagatattccgatacgtattaaccaaacacaacaaaataagcaggatgtaccagaattcgataacgatagatacgcaattatcaaacaagaaattgagcaacttgaaaatgagcgtatagatattcaaaacggtaaggaagaaattaatttgcgtaatcaattagctgataaacaatcagaattgaaacgcatagaagacaataacagcgcaagtaatgagaacaaaatccatgctttaacaaatgaattacacgttgaaaatggaacggtagcaaaccttaaaacgagattaaagcaaaacaaacaacaaatcacacatgaagaaaatagacgtaatcaattattggaaaatcacaaaggactaaaaagtgatttagaaaaatctaaaaatcaaaaatttgaacatcttgatgacaatgtatgtagttgttgtggtcaacagttaccaactgaacaagtgaatgaggcaagagaaaaagctttacagaaattcaatgtaaaaaaatcgaaagaattagaaacaatacaaacatctatcaatcacattatttcagaaggcaagaaaataaagccaatcatcgagaagttagaggatgacaataataatcttcaaattaaaatcaacgaagcagaagagcgttcagcaagaatacaaaacaaaattaataagttgaaaacgactcacgttgacgttacgcaaactgacgaatacaaagcagtaatgttagagataaatgagattaatcaaaaacgctctaacatcaggaaaactattcaagataaagtttcaggaatagatgacaaaataagcgaacttactcaagaaaaatcagaaattgaagtgtcaagatcaatcgaaaaatcaaataaacatctagatgatgttatttctgaattaagaaatgaagaagacagattattggatgaaaaagaaaagtattcacatgacctttatatcttaaagaaatttacaacaacaaaagtcaaaatgcttactgaaaatatcaataacgaatttgatattgctgaatttaagttattcaataccttagttaacggcgaattagaagaaacatgttccacaacagttaacggcgtcgaatacgacagcggtttaaataacgcctcaagaattaatgttggcttagatatcatcaatacactgtcaaaacattttaaagttacagcaccaatatttattgataatgctgaatcagtaacagagcttatcaaaacagaatcacaacaaattcaattgatagtaaatgaacaagataaaaaattaagaatggagactatataaaatgactgaaaataataaattacaaactattgaacaacaattagtacaagaaaagaacgtatctgacaacgtattaaacaaagtgagagttttagagtcacaaggcaatttggaattgccaaatgattattcaccaagtaatgccatgaaacaagcatggttacaaatcagccaagataacaaattaatgagttgtaacgatacaagcaaagcaaatgccttattagacatggtaacgcaaggtttaaatccagctaaaaatcaatgctactttattccttacggcaacaaaatgcagttacaacgtagctatcacggtaatgtaatgatgttaaaacgtgatgcaggtgctcaagatgttgttgctcaagtgatttataaaggcgatacattcaagcaagaaatgggagaaacaggacgtatcaaagcgattaaacacgaacaagacttctttaacatcgacaaagaaaacattatcggtgcgtactgcacaatcgtatttaatgatggacgagataactatattgaagtcatgactattgaacaaattaaacaagcatggatgcagtcatcaatgattaaagatgaaaaagcattacaaaattctaaaacacataataatttcaaagaagaaatggctaaaaaaacagttatcaatagagctgctaaacgttatatcaacacatcaacagatagcaatattttcaaatacgcacaagaatccgaacaacgtcaacgcaaagaagtgttggacgcagaagttgaagaaaatgcaaatcaagaacaattggactttgaacaaccagttcttgaagaagcacaatacacagaattagaaaatgataagcctattgatgtatctgactttgaagaaataaaagaacctgcaacagaaaaagaaagcgaagaagagccattttaattgaaacaatagcaactggttcaagtggtaactgctacgtcttaaatgatggacgtactacgttactacttgaggcaggtataaaatttgaatgtgttcaaaagcattttaaatataaaacaagacatatagcagggtgtcttatcacacacgaacatggtgatcatgcaaagtacacaaagcagtttgtcgacaatggtgtaatcagctatatgactgctggaacacaacaagctatgaattttgaaagtcatcgcttatgcacgattaaggcaaagcaagagctgcgaataggcacatggtcaattctaccgtttgacatcgaacatgatgctaacgagcctgtggctttcttattacaaagtacattaggttataaggttctgtatgttactgatacaaagtatttgaaatacaaatttaacggcattacgcacatgatgttagaagttaattatatctatgaacaaatgcaggaaaacataaaaaacggcagtgtgcacagcacattagcaaatagaattatggagtctcattttagcttagaacatgctatcggaatgttaaaagcaaatgatttaactagactcgaagaaatacatttaattcatttaagtagccaaaattcaaatgcaaaatacattaaaagtgaaatacaaaaagtgacgggcgtgcccgtttatgttggaggtttataaatgataaacagaacaatattagttggtcgtttaactagagacccagaattaaggaccactcaaagtggtgtaaatgtagcatcattcacattagcagttaaccgtacatttacaaatgcacaaggcgagcgcgaggcagactttataaatgtcatcgtatttaaaaaacaagcagagaacgttaataaatacctatctaaaggatcgttgacgggcgtagatggtaggttacaaacgcggaattatgaaaataaggaaggtcaacgtgtatatgttacggaagttattgctgatagtattcaatttttagaaccgaaaaactcaaatgacactcaacaagatttataccaacaacaagtacaacaaacacgtggacaatcgcaatattcaaataacaaaccagtaaaagataatccgtttgcgaatgcaaatggtccgattgaaatagatgacgatgatttaccattctaatttaaccggtttgaaagtgaggtgtgtatatgactggttggataagtattgatcgctcaattcaaaatcattggctatttaaagaaaagagaacattttcaaagtttgaagcatggatatatttactcatggaagcgaatcattcaaaggcaaaagtgcctattggaaaccaaattgtaaccgtagaaagaggacaaagattaacatcgattttgaccttgtctgacctttttaactggtcacgatttaaagtgaaaaccttccttgacttactcgagagtgatggaatgttagaagtcaaaacaacatcaaaatacacccttataaccattgtcaattatgacttttatcaaagtgagcagggcaggaaccaacatcaaaacgacatcaaaccaacatcaaaacaacatcagtcaaacatcaacccaacatcaaaacaacatcaaaccaacacaaacaataatgataataaagataataatgaaaagaatgtgaataatgagaagaagaaggtaaccgccttcgacttcttccaagataacggattcggtttcataactccttacaatttagacgatttaaattattatcttgattcatttgaaaatgattcagatcaaatagttaccgcatcacttaaaatcgctaaagatagaaacaaagttacttggggatatgctaaaagcattttgaatacatggcttaatgcaaacttgaaatctattgaacaagtacgtgcatttgaaaagcaacaacttgaaagcaaaaaacaaaattataaacctttcgttaaacaatcaaaagaaaaaacacccaaatggctcacagacagcacgagagaaacgaaaacgccggaagtagatgaaaaccttgagaaagacagagaagcttttattaagcgtctaaatagcaaatgggagtgattgaaaatggatgcatttgataaatactatctatttgatcatgacggcaacaaaatgttttcagttacaccacattttaaagatggtcggcatttagttgttggattaaaacatacaaaattcaatggtcgacgttggtacttagatgattatgaattaaaaacacttattgataatgaacaaatggagttaggacaccaaacaagcttatttgaatatatatgagggattacatggaaatagaaattaaatttaatgaagtgtttaatgcgccgatggggtcgcctcgtccacgctttcgtaatacaggtagatatgcacacacatatatgcctacaaaatatacagaacataaaaaatatttacaaaatcaaatgccaaagctaaatctagaaaatgcattaaaaattgaattagagttttactttccattgcttaaatcatggtcgaagaaaaagaaaaacgaaatggttgggcagtataaagtgactaagccggatatcgacaacttaattaaaacggtattagatgcttgtaatggccatttatggaaagacgataaccaaattacagaaataactagctcaaagcgttatggaattgagcccaaaataatcatacgaatagaagaaatataagaggtggataaaatggcgagaaaagcaagaattgtaacaataaacgataaaccttataggttcagtaaatttgaaatggaattaatagaaagtcacggtataaccgctggaatggtttctaagagagtaaaagacggttgggaactacatgaagcaatggacgcaccagaaggtacgcgtttaagcgagtacagagaaaagaaaacaatagaaagactggaacaagctagactcgaacgcaaattggaaagagagcgaaagaaagaggctgagctaagaagaaagaagccacatttgtttaatgtgcctcaaaaacatccaagaggacgttatgcgtgctacctgttggaaaacgacatattcgtgaaagttaagaagtagatcatgacagataacgcacgcaaagaatacctaaatcaattctttggatttaagagatatctgtatcaggataacgaacgagtggcacatattcatgtagtaaacggcacttattactttcatgggcatatcgtgccaggttggcaaagcgttaaaaagacatttgatactgctgaagagctcgaaatatatataaagcaacatggtttggaatacgaggaacagaagcaactaactttattttagaggagatggaaatgatgaatgctgaaaagcatatgcaaatgatgcaaatgttacaaaattgtgtgattgataagtatgtatcacacgacgaatacgaagagttaattgccatagataagcatggtaataaaatgtttattaaattttatccgaatacggaggatgacactaatgaataatcgcgaacaaattgaacaatcagttataagtgctagtgcgtataacggtaatgacacagagggattactaaaagagattgaggacgtttataagaaagcgcaagcgtttgatgaaatacttgagggaatgacaaatgctattcaacattcagttaaagaaggtgttgaacttgatgaagcagtagggattatggcaggtcaagttgtctataaatatgaggaggaacaggaaaatgagcattagtgtaggagacaaggtttttaatccagaaacaaattcaactttagaaattgtacaacttgttggcgatattagagacacgcattacaagttatctgacggatctattattagtcttatagactttgttgttaaaccaattcatttaatcaaggaggagcaggaaaatgactaacacattacaagtaaggctattatcagaaaatgctagaatgcccgaacgaaatcataagacggatgcaggttatgacatattctcagctgaaactgtcgtacttgagccacaagaaaaggcagtgattaaaacagatgtagctgtaagcataccagagggctatgtcgggctattaactagccgtagtggtgtaagtagtaaaacacatttagtgattgaaacaggcaagatagacgccggatatcacggcaatttagggattaatattaagaatgatgaagaacgtgatggaataccctttttatatgatgatatagacgctgaattagaagatggattaataagcattttagatataaaaggtaactatgtacaagatggaagaggcataagaagaatttaccaaatcaacaaaggcgacaaactagcacaactggttatcgtgcctatatggacacctgaactaaagcaagtggaggaattcgagagtgtttcagaacgtggagcaaaaggcttcggaagtagcggagtgtaaagacatcttagatcgagtcaaggaggttttggggaagtgacacaatacttagtcacaacattcaaagattcaacaggacgtaaacatacacacataactaaagctaagagtaatcaaaggtttacagttgttgaggcagagagtaaagaagaagcgaaagagaagtacgagaaacaagttaaaagggatgcagttattaaagtgggtcagttgtttgaaaatataagggagtgtgggaaatgattaaaaaacttaaaaatatggatgggttcgacatctttattgttggaatactgtcattattcggtataaccgcattgctacttgttgtcgcattgcctatctatacagtggctagttaccaaaacaaagaagtacatcaagggacaattacagataaatataacaaaagacaagataaagaggacaaattctatattgtattagatgataaacaagtcatcgaaaactcagacttattcttcaaaggaaagtttgatagcgcagacatacaagctaggttaaaagtaggtgataaagtaaaagttaagacgattggatatagaatacactttttaaatttatatccggtcttatacgaagtaaagaaggtagataaaaaatgattaagcaaatactaagattattattcttactagcgatgtatgagttaggtaagtatgtaactgagcaagtatatattatgatgacggctaatgatgatgtagaggcgccgagtgattacgtctttcgagcggaggtaagtgagtgatgtggattactatgactattgtatttgctatattgctattagtttgtatcagtattaatagtgatcgtgcaagggagatacaagcgctcagatatatgaatgattatctacttgatgaagtagttaaaactaaaggatacaacgggttaaaagaatacaggattgaattaaagcgaatgaataacgatattaaaaagtaatttatattatcggaggtattgcatgtataacaggaaagaaatacgtgaaatgatagataactacaagtggatgaaaaatataatagacagtaaagtctacgataacgaaagtacatcaattgcacaatacggttatcaatctgcgatgccaaaagctaaaggcacgactagcaataaagtgttagtgaaagttataaacaaaaacaaagcgcttagaaagtacgattacttgattaataagatagcgttcattgatgaatacgaagaatacatcacgaatgaaaaagattatcatattttacaaatgttaaaacaacgagaaagccataataggattatgagtattcttgatataggcagagacaatttttattctagagtaaaagatatagtaaatatactttataacttgcaaacaagaaaccgacacatcgtacacatcggacagttcggacacatcgtacaaatcgtacaaatcgtacacatcggactaattttgatgctacatattgttttttattataattgctatgtagcaaaacatttatatttattttgaactctcacattaagtgagggtttttatttttataaacaagaggtggagaatggagatatcaaagtaccaagagatagctacacgtacacacaatgatgaattgaatttaaatgaatctattacttgttacggcttaggtttaactcaatctacaggcaatgttacagatctaattaaacagcatatgttttgtaatgtaccgatagataaaggaattatgataaatgaacttagcgaagcattgtggaatatagctaatcttactaacgtgttaggtattaacttggatgagatagctggtcatagtgttaacactatcttgatgaataaacctaatcagactatcaatttagacaatggtataaaacaaggagacaaagtattgtttcaaggtagtaaatatcttgttgatggatcgataggaaacttattgttaattagcaatgataaagatgatagacaagtaactgtgcaagatgttaagaaagtcgacaaggagtgatgtgcattgtctattatgaagcgatgtggtcatccaacatgtaatgtattgattaatcataatgaaagttattgtgataaacacaagcaatatgcaaatgaaaattacaatgatttgagacgtcgaaacgatccagagtatttaagattttataaatcgaaaacgtggcaaaacatgcgtcgaattgtattgttagaacatgactttatttgtgtttcttgtggcaatcaagcgactatggttgaccatattgtaccaacaaaaattgattgggcaagaagattagacaaaagtaatttacagcctttgtgtgatgcttgccataaccaaaagacaaaagaagatttgaagaaatattaaaaaagataaaaataggaagtcccccaaagatgaaacgggcgtcaatgaaaggttctggagaa

SEQ ID NO: 6 - DNA, 41565 bp, Bacteriophage F87s/06
tagggagtaaacttcgcgataattttaaaaatccatgtataacccccctcttataaccattttaaggcaggtgatgaaatggagattatagtcgatgaaaatttagtgcttaaagaaaaagaaaggctacaagtattatataaagacatacctagcaataaattaaaagtagttgatggtttaattattcaagcagcaaggctacgtgtaatgcttgattacatgtgggaagacataaaagaaaaaggtgactatgatttatttactcaatctgaaaaggcgccaccatatgaaagggaaagaccagtagccaaactatttaatgctagagatgctgcatatcaaaaaataatcaaacaattatcggatttattgcccgaagagaaagaagacacagaaacgccatctgatgattacctatgattagtaataaatacgttgatgaatatataaatttgtggaaacaaggaaagataattttaaataaagaaagaattgatctctttaattatctacaaaaacatatatattcacgagatgatgtatattttgatgaacagaaaatcgaggattgtatcaaatttattgaaaaatggtattttccaacattaccatttcaaaggtttatcatagctaatatatttcttatagataaaaatacagatgaagctttctttacagaatttgctattttcatgggacgtggaggcgggaaaaacggtctaataagtgctattagtgattttctttctacgcccttacacggagttaaagaatatcacatctccattgttgctaatagtgaagatcaagcaaaaacatcgtttgatgaaatcagaaccgttttaatggataacaaacgaaataagacgggtaaaacgccaaaagctccttatgaagttagtaaagcaaaaataataaaccgtgcaactaaatcggttattcgatataacacatcaaacacaaaaaccaaagacggtggacgtgaggggtgtgttatttttgatgaaattcattatttctttggtcctgaaatggtaaacgtcaaacgtggtggattaggtaaaaagaaaaatagaagaacgttttatataagtactgatggttttgttagagagggttatatcgatgcaatgaagcacaaaattgcaagtgtattaagtggcaaggttaaaaatagtagattgtttgctttttattgtaagttagacgatccaaaagaagttgatgacagacagacgtgggaaaaggcgaacccaatgttacataaaccgttatcagaatacgctaaaacactgctaagcacgattgaagaagaatataacgatttaccattcaaccgttcaaataagcccgaattcatgactaagcgaatgaatttgcctgaagttgaccttgaaaaagtaatagcaccatggaaagaaatactagcgactaatagagagataccaaatttagataatcaaatgtgtattggtggtttagactttgcaaacattcgagattttgcaagtgtagggctattattccgaaaaaacgatgattacatttggttaggacattcgtttgtaagacaagggtttttggatgatgtcaaattagaacctcctattaaagaatgggaaaaaatgggattattgaccattgtcgatgatgatgtcattgaaattgaatatatagttgattggtttttaaaggctagagaaaaatatgggcttgaaaaagtcatagctgataattatagaactgatattgtaagacgtgcgtttgaggatgctggcataaaacttgaagtacttagaaatccaaaagcaatacatggattacttgcaccacgtatcgatacaatgtttgcgaaacataacgtaatatatggagacaatcctttgatgcgttggtttactaataatgttgctgtaaaaatcaagccggatggaaataaagagtatatcaaaaaagatgaagtcagacgtaaaacggatggatttatggcatttgttcatgcgttatatagagcggatgatatagtagacaaagacatgtctaaagcacttgatgcattaatgagtatagatttctaatagaggaggtgagacatgagtattctagaaaagatatttaaaactaggaaagatatatcatatatgcttgatttagatatgatagaagatttatcacaacaagcgtatgtgaaacgtttagcgattgatagttgtattgaatttgttgcgcgagctgtcgctcaaagtcattttaaagtattggaaggtaatagaattcaaaagaatgatgtttactacaagttaaatataaaaccaaatactgacttatcaagcgatagtttttggcaacaagttatatataaactaatttacgataacgaggttttaatcgtagtaagtgacagcaaagaattacttatcgcagatagcttttacagagaagagtatgctttgtatgatgatatattcaaagatgtaacggttaaagattatacttatcaacgtactttcacaatgcaagaggtcatatatttaaagtacaacaacaataaagtgacacactttgtagaaagtctattcgaagattacgggaaaatattcggaagaatgataggtgcacaattaaaaaactatcaaataagagggattttgaaatctgcctctagcgcatatgacgaaaagaatatagaaaaattacaagcgttcacaaataaattattcaatacttttaataaaaaccaactagcaatcgcgcctttgatagaaggttttgattatgaggaattatctaatggtggtaagaatagtaacatgcctttttctgaattgagtgagctaatgagagatgcaataaaaaatgttgcgttgatgattggtatacccccaggtttgatttacggagaaacagctgatttggaaaaaaacacgcttgtatttgagaagttctgtttaacacctttattaaaaaagattcagaacgaattaaacgcgaaactcataactcaaagcatgtatttgaaagatacaagaatagaaattgtcggtgtgaataaaaaagacccacttcaatatgctgaagcaattgacaaacttgtaagttctggttcatttacaaggaatgaggtgcggattatgttaggtgaagaaccgtctgacaatcctgaattagacgaatatctagtgacgaagaactacgaaaaagcaaacgaaaatggtagtacattgaaaggtggtgatgaagatgaaagtggagattaaaggcgtcatcgtttccaacgaagataaatgggtttacgaaatgcttggtatggattcgacttgtcctaaagatgttttaacacaactagaatttagtgatgaagatgttgatattataattaactcaaatggtggtaacctagtagctggtagtgaaatatatacacatttaagagctcataaaggcaaagtgaatgttcgtatcacagcaatagcagcaagtgcggcatcgcttatcgcaatggctggtgaccacatcgaaatgagtccggttgctagaatgatgattcacaatccttcaagtattgcgcaaggagaagcgaaagatctaaatcatgctgcagaaacattagaacatgttggtcaaataatggctgaggcatatgcggttagagctggtaaaaacaaacaagaacttatagaaatgatggctaaggaaacatggctaaatgctgatgaagccattgaacaaggttttgcggatagtaaaatgtttgaaaacgacaatatgcaaattgtagcaagcgatacacaagtgttatcgaaagatgtattaaatcgtgtaacagctttggtaagtaaaacgccagaggttaacattgatattgacgcaatagcaaataaagtaattgaaaaaataaatatgaaagaaaaggaatcagaaatcgatgttgcagatagtaaattatcagcaaatggattttcaagattccttttttaatacaaaaataggaggtcataaaatgactataaatttatcggaaacattcgcaaatgcgaaaaacgaatttattaatgcagtaaacaacggtgaaccgcaagaaagacaaaatgaattgtacggtgacatgattaaccaactatttgaagaaactaaattacaagcaaaagcagaagctgaaagagtttctagtttacctaaatcagcacaaactttgagtgcaaaccaaagaaatttctttatggatatcaataagagtgttggatataaagaagaaaaacttttaccagaagaaacaattgatagaatcttcgaagatttaacaacgaatcatccattattagctgacttaggtattaaaaatgctggtttgcgtttgaagttcttaaaatccgaaacttctggcgtggctgtttggggtaaaatctatggtgaaattaaaggtcaattagatgctgcgttcagtgaagaaacagcaattcaaaataaattgacagcgtttgttgttttaccaaaagatttaaatgattttggtcctgcgtggattgaaagatttgttcgtgttcaaatcgaagaagcatttgcagtggcgcttgaaactgcgttcttaaaaggtactggtaaagaccaaccgattggcttaaaccgtcaagtacaaaaaggtgtatcggtaactgatggtgcttatccagagaaagaagaacaaggtacgcttacatttgctaatccgcgcgctacggttaatgaattgacgcaagtgtttaaataccactcaactaacgagaaaggtaaatcagtagcggttaaaggtaatgtaacaatggttgttaatccgtccgatgcttttgaggttcaagcacagtatacacatttaaatgcaaatggcgtatatgttactgctttaccatttaatttgaatgttattgagtctacagttcaagaagcaggtaaggttttaacgtacgttaaaggtctatatgatggttatttagctggtggtattaatgttcagaaatttaaagaaacacttgcgttagatgatatggatttatacactgcaaaacaatttgcttacggcaaagcgaaagataataaagttgctgctgtttggaaattagatttaaaaggacataaaccagctttagaagataccgaagaaacactataaaattttatgaggtgataaaatggtgaaatttaaagttgttagagaatttaaagacatagagcacaatcaacacaagtacaaagtaggggagttgtatccagctgaagggtataacaatcctcgtgttgaattgttgacaaatcaaatcaaaaataagtacgacaaagtttatatcgtacctttagataagctgacaaaacaagaattattagaactatgcgaatcattacaaaaaaaagcgtctagttcaatggttaaaagtgaaatcatcgacttattgaatggtgaagacaatgacgattgatgatttgcttgtcaaatttaaatcacttgaaaagattgaccataattcagaggatgagtacttaaagcagttgttaaaaatgtcgtacgagcgtataaaaaatcagtgcggagtttttgaattagagaatttaataggtcaagaattgatacttatacgcgctagatatgcttatcaagatttattagaacacttcaacgacaattacagacctgaaataatagatttttcgttatctctaatggaggtatcagaagatgaagaaagtgtttaagaaacctagaattacaactaaacgtttaaatacgcgtgttcatttttataagtatactgaaaataatggtccagaagctggagaaaaagaagaaaaattattatatagctgttgggcgagtattgatggtgtctggttacgtgaattagaacaagctatctcaaacggaacgcaaaatgacattaaattgtatattcgtgatccgcaaggtgattatttacccagtgaagaacattatcttgaaattgaatcaagatatttcaaaaatcgtttgaatataaagcaagtatcaccagatttggataataaagactttattatgattcgtggaggatatagttcatgagtgtgaaagtgacaggtgataaagcattagaaagagaattagaaaaacattttggcataaaagagatggtaaaagttcaagataaggcgttaatagctggtgctaaggtaattgttgaagaaataaaaaaacaactcaaaccttcagaagactcaggagcgctgattagtgagattggtcgtactgaacctgaatggataaaggggaaacgtactgttacaattaggtggcgcgggccttttgaacgatttagaatagtacatttaattgaaaatggtcatgttgagaaaaagtcaggaaaatttgtaaaacctaaagctatgggtgggattaatagagcaataagacaaggtcaaaataagtattttgaaacgttaaaaagggagttgaaaaattgtgattgatattttgtacaaagttcatgaagtgattagtcaagacagaattattagagagcacgtaaatatcaataatattaagttcaataaataccctaatgtaaaagatactgatgtaccttttattgttattgacgatatcgacgacccaatacctacaacttatactgacggagatgagtgtgcatatagttatattgtccaaatagatgtttttgttaagtacaatgatgaatataatgcgagaatcataagaaataagatatctaatcgcattcaaaagttattatggtctgaactaaaaatgggaaatgtttcaaatggaaaaccggaatatatagaagaatttaaaacatatagaagctctcgcgtttacgagggcattttttataaggaggaaattaaatggcaataaaacatgcaagtgcgccaaaggcgtattttaacattactggtttaggtttcgctaaattaacgaaagaaggcgcggaattaaaatatagtgatattacaaaaacaagaggattacaaaaaatagtgttgaactggtggagaactaaaaacaagcttatgctgatggtggtccaatcgaatcagggaacacagacggagaaggtaaaatttcgttacaaatgcatgctttccctaaagagattcgcaaaattgtttttaatgaagattatgatgaagatggcgtttacgaagagaaacaaggtaaacaaaacaattacgtagctgtatggttcagacaagagcgtagagacggtacatttagaacagttttattacctaaagttatgtttacaaatcctaaaatcgatggagaaacggctgagaaagattgggatttctcaagtgaagaggttgaaggtgaggcacttttccctttagttgataataaaaagtcagtacgtaagtatatctttgattcagctaacatgacaaatcatgatggagacggtgaaaaaggcgaagaggctttcttaaagaaaattttaggcgaagaatatactggaaacgtgacagagggtaacgaagaaactttgtaacaaaaccggcttcatcggaaactgcggtaaagtcggttaatataccagatagcattaaaacacttaaagttggcgacacatacgatttaaatgttgtagtagagccatctaatcaaagtaagttattgaaatacacaacagatcaaacgaatattgtatcaatcaatagtgatggtcaagttactgcggaagcacaaggcattgctacggttaaagcaacagttggtaatatgagtgacactataacaataaatgtagaagcataagagggggcaacccctctattttatttgaaaataaggagagtattataaaatggcaaaattaaaacgtaacattattcaattagtagaagacccgaaagcaaatgaaattaaattacaaacgtacttaacaccacacttcatttcatttgaaattgtatacgaagcaatggatttaatcgatgatattgaggacgaaaatagcacgatgaaaccaagagaaatcgctgacagattgatggatatggttgtaaaaatttacgataaccaattcacagttaaagacctaaaagaacgtatgcatgcacctgatggaatgaatgcacttcgtgaacaagtgattttcattactcaaggtcagcaaactgaggaaactagaaattttatccagaacatgaaataaagcctgaagatttaacatataaagcaatgttgaaaaatatggatactctcatgatggacttaattgaaaatggtaaagacgctaacgaagttttaaaaatgccatttcattatgtactttccatatatcaaaataaaaacaatgacatttctgaagaaaaagcagaggctttaattgatgcgttttaaccttaaccgtttggttagggttatttttttgaacttttttagaaaggaggtaaaaaatgggagaaagaataaaaggtttatctataggtttggatttagatgcagcaaatttaaatagatcatttgcagaaatcaaacgaaactttaaaactttaaattctgacttaaaattaaccggtaacaacttcaaatataccgaaaaatcaactcatagttacaaacaaaggattaaagaacttgatggaactatcacaggttataagaaaaacgttgatgatttagccaagcaatatggcaaggtatctcaagaacagggcgaaaacagcgcggaagctcaaaaattacgacaagaatataacaaacaagcaaatgagctgaattttttagaaaaagaactagaaaaaacaacaactgagtttgaagagttcaaaaaagctcaagttgaagctcaaagaatggcagaaagtggctggggaaaaaccagtaaagtttttgaaagtatgggacctaaattaacaaaaatgggtgatggtttaaaatccattggtaaaggtttgatgattggtgtaactgcacctgttttaggtattgcagcagcatcaggaaaagcttttgcagaagttgataaaggtttagatacagttacccaagcaacaggagcaaccggcggagagcttaagaagttgcagaattcatttaaagatgtttatggcaactttccagcagacgctgagactgtaggcggtgttttaggggaagttaacacaaggttaggtttcactggcaaagaacttgagagtgccacagagtcattcttgaaatttagtcacataacaggttctgaaggcgtacaagccgttcaattaattacgcgtgcaatgggtgatgcaggtattgaagctgatgagtatcaaagtgtacttgatatggtagcgaaagcagcacaggctagcggtataagtgttgatacattagctgatagcattactaaatacggtgctccaatgagggctatgggctttgagatgaaagaatcaatcgctttattctctcaatgggagaaatcaggtgttaatactgaaatagccttcagtggtttgaaaaaagctatatccaattggggtaaagctggtaaaaatccaagagaagaatttaagaagacattagcagaaattgaaaagacgccggatatagctagcgcaacaagtttagcgattgaagcatttggtgcaaaagcaggtcctgatttagcagatgctattaaaggtggtcgttttagttatcaagaatttttaaaaactatcgaagattcccaaggcacagtaaatcaaacgtttaaagattctgaaagtggctccgaaagatttaaagtagcaatgaataaattaaaattagtaggtgctgatgtatggacttctattgaaagtgcgtttgcaccagtaatggaagaattaatcaaaaagctatctatagcggttgattggttttccaatttaagtgatggttctaaaagatcaattgttattttcggtggtattgctgctgcaattggtcctgtagtttttggattaggcgcatttataagtacaattggcaatgcagtaactgtattagccccactattagctggtattgcaaaggctgatggattaattagttttttatcgactaaagtacctattttaggaacagtcttcacagcattaactggtccaattggtatcgtgttaggtgtactggctggtttagcagtcgcatttacaatagcttataagaaatctgaaacattcagaaattttgttaatggtgcaattaacagtgttaaacaaacgtttagtaatttcattcaatttatccaacctttcattgattccgttaaaaacgtctttaaacaagcggtttcagcaatcgttgatttcgctaaagatatttggagtcaaattaatggattctttaatgaaaacggaatttctattgttcaagcgcttcaaaatatatgcaattttatcaaagctatatttgaatttatcttaaattttgtaattaaaccaatcatgtttgcgatttggcaagtgatgcaatttatttggccggcggttaaagccttgattgtcagtacttgggagaatataaaaggagtaatacaaggtgctttaaatatcatacttggctttattaagttcttttcaagtttattcactggtaattggcgaggtgtttgggacggtattgtgatgatactaaaaggcactgtgcagttaatttggaatttaatacaactgtggtttgtaggtaagattctaggtgttgttagatactttggtggattgcttaaaggtttaatatccggtatctggggtgttatcaaaggtattttcacaaaatcattatctgcaatttggaatgcaacgaaaagtatttttggtttcttatacaatagtgttaaatctattttcactaatatgaaaaactggttatctagtacgtggaataatatcaaaagcaataccgtcggcaaggctcattcgttatttacgggtgtaaggtctaaattcacaagtttatggaatgcgacgaaagatatatttactaaattaagaaattggatgtcaaacatctggaactctattaaagataacacggtaggtatagcgggtcgcttatgggatagagtgcgtaacatctttggaagcatgcgtgacggtttaaaatctatcattagtaaaattaaagatcatatcggtggtatggtagacgctgttaaaagaggtcttaataaattaattgaaggtttaaactgggtcggtggtaagttgggtatggacaaaataccgaagttacacactggtactgaacatacacatactactacaagattagttaagaacggtaagattgcacgtgacacattcgctacagttggggataagggacgcggaaatggtccaaatggtttcagaaatgaaatgattgaattccctaatggtaaacgtgtaatcacaccaaatacagatactacggcttatttacctaaaggctcaaaagtatacaacggggcacaaacttattcaatgttaaacggaacgcttccgagatttcatttcggtactactatgtggaaagatattaaatctagtgcatcatcggcatttaactggacaaaagatcaaataggtaaaggtaccaaatggcttggcgataaagttggcgatgtaatggactttattgataatccgggtaagcttttaaattatgtgctcaaagcgtttggtgttgactttagctctctaactaaaggtatgggtattgttggcgatataacaaaagcgtcttggaataagattaaaagtaaggcgattaattggataaaagaaggattagagagccaagcgggagatggttctgtgtttgatagtttcagaatactacaaccttattcagcaccgccaaaacctcctaaccccaattatccatttaacggaggcgttcatcatggtgttgactatgatacgccgaccggtacccctatacgtacgccaatgggtggacgtgttagaagttggtatgacaactatggtggcggtaaagcaattactgttcaaaaaggtcgaacatttttgtggttcatgcacttatctgaacaattgcgtagaacaggtgaacaaattaaagctggtcaattaattggtaaatcaggtaatacaggttctatgactaattaccgccatttacatttccaagtcaatcaaggcggagagtccaataggtattcgacagaccctattccttggttacggaaaaacgacaaaactggtggaaagaattcacctggagggagtggttctgaaaatgcgcgcagagcgattagaacagctcaaaatatacttggaggtcaatacaaagctagctggattacacacgaaatgatgcgtgtagcaagacgtgaatccaattatacagctaatgcagttaataattgggatagcaacgcaagagctggtacaccttcaagaggtatgttccaaatgatagatccttcatttagagcgtacgcaaagtcgggttacaataatcctcttaacccaactcatcaagctatatcggctatgagatatattgtgggtaaatgggtaccaagaacgggctcatggagagctgcgttcaaacgcgctggtgattacgcatatgctactggtggcaaagtctacaacggattgtaccacttaggagaagaaggatatccagagtgggttattcctactgatcctgcacgtaaaaacgaagcaatgaagatgttacattatgcagcagcagaagtaagagggagaaaagcgagtaaaaataagcgtcctagtcaattgtctagtgtaaatgggtttgatgacccaagcttattattgaaaatgattgaacaacagcaacaacaaatagctttattactgaaaatagcgcaatccaacgatgtgattgcagataaagattatcagccgattattgacgaatacgcttttgataaaaaggtgaacgcgtctatagaaaagcgagaaaggcaagaatcaacaaaagtaaagtttagaaaaggaggaattgctattcaatgatagacactattaaagtgaacaacaaaacaattccttggttgtatgtcgaaagagggtttgaaataccctcttttaattatgttttaaaaaactgaaaatgtagatggacgttcggggtctatatataaagggcgtaggcttgaatcttatagttttgatatacctttggtggtacgtaatgactatttatctcacaacggctttaaaacacatgatgacgtcttgaatgaattagtaaagttttttaactacgaggaacaagttaaattacaattcaaatctaaagattggtactggaacgcttattttgaaggaccaataaagctgcacaaagaatttgcaatacctgttaagttcactatcaaagtagtactaacagacccttacaaatattcagtaacaggatataaaaatactgcgatttcagaccaagtttcagttgtaaatagtgggactgctgacactcctttaattgttgaagcccgagcaattaaaccatctagttactttatgatcactaaaaatgatgaagattattttatggttggtgatgatgaggtaaccaaagaagttaaggattacatgcctcctgtttatcatagtgagtttcgtgatttcaaaggttggactaagatgattactgaagatattccaagtaatgatttaggtggtaaagtcggcggtgactttgtgatatccaatcttggcgaaggatataaagcaactaattttcctgatgcaaaaggttgggttggtgctggcacgaaacgagggctccctaaagcgatgacagattttcaaattacctataaatgtattgttgaacaaaaaggtaaaggtgccggaagaacagcacaacatatttatgatagtgatggtaagttacttgcttctattggttatgaaaataaatatcatgatagaaaaataggacatattgttgttacgttgtataaccaaaaaggagaccccaaaaagatatacgactatcagaataaaccgataatgtataacttggacagaatcgttgtttatatgcggctcagaagagtaggtaataaattttctattaaaacttggaaatttgatcacattaaagacccagatagacgtaaacctattgatatggatgagaaagagtggatagatggcggtaagttttatcagcgtccagcttctatcatagctatctatagtgcgaagtataatggttataagtggatggagatgaatggattaggttcattcaatacggagattctaccaaaaccgaaaggcgcaagggatgtcattatacaaaaaggtgatttagtgaaaatagatatgcaagcaaaaagtagttgtcatcaatgaggaaccaatgttgagcgagaaatcgtttggaagtaattatttcaatgttgattctgggtacagtgaattaatcatacaacctgaaaacgtctttgatacgacggttaaatggcaagatagatatttatagaaaggagatgagagtgtgatacatgttttagattttaacgacaagattatagatttcctttctactgatgacccttccttagttagagcgattcataaacgtaatgttaatgacaattcagaaatgcttgaactgctcatatcatcagaaagagctgaaaagttccgtgaacgacatcgtgttattataagggattcaaacaaacaatggcgtgaatttattattaactgggttcaagatacgatggacggctacacagagatagaatgtatagcgtcttatcttgctgatataacaacagctaaaccgtatgcaccaggcaaatttgagaaaaagacaacttcagaagcattgaaagatgtgttgagcgatacaggttgggaagtttctgaacaaaccgaatacgatggcttacgtactacgtcatggacttcttatcaaactagatatgaagttttaaagcaattatgtacaacctataaaatggtattggatttttatatagagcttagttctaataccgtcaaaggtagatatgtggtactcaaaaagaaaaacagcttattcaaaggtaaagaaattgagtatggtaaagatttggttgggttaactaggaagattgatatgtcagaaatcaaaacagcattaattgctgtgggacccgaaaatgacaaaggaaagcgtttagagttagttgtgactgatgacgaagcacaaagtcaattcaacttacctacccgttatatttggggaatatacgaacctcaatcagatgatcaaaatatgaatgaaacacggttgcgttctttagccaaaacagagttaaataaacgtaagtcggcagttatgtcatatgagattacttctactgatttggaagttacgtatccgcacgagattatatcaattggtgatacagtcagagtaaaacatagagattttaacccgccattgtatgtagaggcagaagttattgccgaagaatataacataatttcagaaaatagcacatatacattcggtcaacctaaagagttcaaagaatcagaattacgagaagagtttaacaagcgattgaacataatacatacaaaagttaaacgataatattagcaatatcaacactatagttaaagatgttgtagatggtgaattagaatactttgaacacaaaatacacaaaagtgatacaccgccagaaaatccagtcaatgatatgctttggtatgatacaagtaaccctgatgttgctgtcttgcgtagatattggaatggtcgatggattgaagcaacaccaaatgatgttgaaaaattaggtggtataacaagagagaaagcgctattcagtgaattaaacaatatttttattaatttatctatacaacacgctagtcttttgtcagaagctacagaattactgaatagcgagtacttagtagataatgatttgaaagaggacttacaagcaagtttagacgctgtgattgatgtttataatcaaattaaaaataatttagaatctatgacacccgaaactgcaacgattggtcggttggtagatacacaagctttatttcttgagtatagaaagaaattacaagatgtttatacagatgtagaagatgtcaaaatggccatttcagatagatttaaattattacagtcacaatacactgatgaaaaatataaagaagcgttggaaataatagcaacaaaatttggtttaacggtgaatgaagatttgcagttagtcggagaacctaatgttgttaaatcagctattgaagcagctagagaatccacaaaagaacaattacgtgactatgtaaaaacatcggactataaaacagacaaagacggtattgttgaacgtttagatactgctgaagctgagagaacgactttaaaaggtgaaatcaaagataaagttacgttaaacgaatatcgaaacggattggaagaacaaaaacaatatactgatgaccagttaagtgatttgtccaataatcctgagattaaagcaagtattgaacaagcaaatcaagaagcgcaagaagctttaaaatcatacattgatgctcaagatgatcttaaagagaaggaatcgcaagcgtatgctgatggtaaaatttcggaagaagagcaacgcgctatacaagatgctcaagctaaacttgaagaggcaaaacaaaacgcagaactaaaggctagaaacgctgaaaagaaagctaatgcttatacagacaacaaggtcaaagaaagcacagatgcacagaggaaaacactgactcgctatggttctcaaattatacaaaatggtaaggaaatcaaattaagaactactaaagaagagtttaatgcaaccaatcgtacactttcaaatatattaaacgagattgttcaaaatgttacagatggaacaacaatcagatatgatgataacggagtggctcaagctttgaatgtggggccacgtggtattagattaaatgctgataaaattgatattaacggtaatagagaaataaaccttcttatccaaaatatgcgagataaagtagataaaaccgatattgtcaacagccttaatttatcaagagagggtcttgatatcaatgttaatagaattggaattaaaggcggtgacaataacagatatgttcaaatacagaatgattctattgaactaggtggtattgtgcaacgtacttggagagggaaacgttcaacagacgatatttttacgcgactgaaagacggtcacctgagatttagaaataacaccgctggcggttcactttatatgtcacattttggtatttcgacttatattgatggtgaaggtgaagacggtggttcatctggtacgattcaatggtgggataaaacttacagtgatagtggcatgaatggtataacaatcaattcctatggtggtgtcgttgcactaacgtcagataataatcgggttgttctggagtcttacgcttcatcgaatatcaaaagcaaacaggcaccggtgtatttatatccaaacacagacaaagtgcctggattaaaccgatttgcattcacgctgtctaatgcagataatgcttattcgagtgacggttatattatgtttggttctgatgagaactatgattacggtgcgggtatcaggttttctaaagaaagaaataaaggtcttgttcaaattgttaatggacgatatgcaacaggtggagatacaacaatcgaagcagggtatggcaaatttaatatgctgaaacgacgtgatggtaataggtatattcatatacagagtacagacctactgtctgtaggttcagatgatgcaggagataggatagcttctaactcaatttatagacgtacttattcggccgcagctaatttgcatattacttctgctggcacaattgggcgttcgacatcagcgcgtaaatacaagttatctatcgaaaatcaatataacgatagagatgaacaactggaacattcaaaagctattcttaacttacctattagaacgtggtttgataaagctgagtctgaaattttagctagagagctgagagaagatagaaaattatcggaagacacctataaacttgatagatacgtaggtttgattgctgaagaggtggagaatttaggattaaaagagtttgtcacgtatgatgacaaaggagaaattgaaggtatagcgtatgatcgtctatggattcatcttatccctgttatcaaagaacaacaactaagaatcaagaaattggaggagtcaaagaatgcaggataacaaacaaggattacaagctaatcctgaatatacaattcattatttatcacaggaaattatgaggttaacacaagaaaacgcgatgttaaaagcgtatatacaagaaaataaagaaaatcaacaatgtgctgaggaagagtaatccttagcactatttttatacaaaaatttaaggaggtcatttaattatggcaaaagaaattatcaacaatacagaaaggtttattttagtacaaatcgacaaagaaggtacagaacgtgtagtatatcaagatttcacaggaagttttacaacttctgaaatggttaaccatgctcaagattttaaatctgaagaaaacgctaagaaaattgcggagacgttaaatttgttatatcaattaactaacaaaaaacaacgtgtgaagtagttaaagaagtagttgaaagatcagatttatctccagaggtaacagttaacactgaaacagtatgaaaagctatgagttagatactcataatctttattcttttagaaagcgggtgtactgaattggggtggttcaaaaaacacgaacatgaatggcgcatcagaaggttagaagagaatgataaaacaatgctcagcacactcaacgaaattaaattaggtcaaaaaacccaagagcaagttaacattaaattagataaaaccttagatgctattcaaaaagaaagagaaatagatgaaaagaataagaaagaaaatgataagaacatacgtgatatgaaaatgtgggtgcttggtttagttgggacaatatttgggtcgctaattatagcattattgcgtatgcttatgggcatataagagaggtgaataaaatgtttaaactaatctttggttatagtttctggacatgtttttggttcggtaaatgtaaataagttttagtcagtgcttcggtactgactttttatttattgttgtaattatggtaatatgcagaagtgagcaagttggatagatggtggctatctgagtataaggaggtggtgcctatggtggcattactgaaatctttagaaaggagacgcctaatgattacaattagtaccatgttgcagtttggtttattccttattgcattgataggtctagtaatcaagcttattgaattaagcaataaaaaataaccatcgctaactttggctggtttcgatggttaaatggttattaatttaatctttaatctaaaatagccaccgtctttttaacgggctcattagggtaacatgtttgcgcatgttgccctttttctatatataaattaacacaccataatataaatatcaaatagacggcttattagtcgtctttttattttgggtaaaaggagataagaatatgattaattggaaaattagaatgaaacaaaaatcattttgggtagcgatattgtcagctatctttttatttgctcaaaacatcgcaaaagctattgggtatgatatccaagtttatacagagcaattaacagacggtttaaacgctatattaggatttttagtattaactggtgtgattcaagacccgactactaaaggtataggtgatagccaccaagctttagaatatgaagaaccaagaagaaaatactaggaggtaaaataatgaaaacatacagtgaagcaagagcaaggttacgttggtatcaaggtagatatattgattttgacggttggtatggttaccaatgtgcagatttagcagttgattacatttattggttgttagaaattagaatgtggggaaatgcaaaagatgcaatcaataacgattttaaaaacatggcaacagtatatgaaaacacaccatcgtttgttccacaaataggtgatgtggctgtatttaccaaaggaatatataaacaatacggtcatattggtttagtgtttaatggtggtaatacaaaccaatttttaattttggaacagaactatgacggtaacgcaaatacgcctgcaaagttacgttgggataattattacggctgtactcactttattagacctaagtataaaagtgagggcttaatgaataagatcacaaataaagttaaaccacctgctcaaaaagcagtcggtaaatctgcaagtaaaataacagttggaagtaaagcgccttataaccttaaatggtcaaaaggtgcttattttaatgcgaaaatcgacggcttaggtgctacttcagccactagatacggtgataatcgtactaactatagattcgatgttggacaggctgtatacgcgcctggaacattaatatatgtgtttgaaattatagatggttggtgtcgcatttattggaacaatcataatgagtggatatggcatgagagattgattgtgaaagaagtgttttaattcttaggttaaaatgttaaatatttgttaattattttttaatgtaattttagtttcttttaatattttattgatttttaatattttctcaatataaaatgaagttgttgatatttatcatcttaaataagggtgttagctataaaaagagataaataaaaacaaatatattatatttggaggaagcgccatgctcaaaagaggtttattatttttaactgttttattgttattattctcattttcttcaattactaatgaggtaagtgcatcaagttcattcgacaaaggaaaatataaaaaaggcgatgacgcgagttattttgaaccaacaggcccgtatttgatggtaaatgtgactggagttgatggtaaaggaaatgaattgctatcccctcattatgtcgagtttcctattaaacctgggactacacttacaaaagaaaaaattgaatactatgtcgaatgggcattagatgcgacagcatataaagagtttagagtagttgaattagatccaagcgcaaagatcgaagtcacttattatgataagaataagaaaaaagaagaaacgaagtctttccctataacagaaaaaggttttgttgtcccagatttatcagagcatattaaaaaccctggattcaacttaattacaaaggttgttatagaaaagaaataaaacaaaatagttgtttattatagaaagcaatgtcttgattgaatatgtgtagtgaaaattatctttcatcaaattctcattcatgcacgaatggttcttccccacctaatcagatattaggtgacttatggggagaaatcagttaggatgaaaaagtggataatccttttttaggcaggtacttcggtacttgcctatttttttatgttataatctttctagacgtattcaaaggacgtctttttagattgtatgttatagctagctttcgggctagttttttgctatgatgtgttacacatgcatcaactatttacatctatccttgttcacccaagcatgtcactgggtgtttttttcttatgatagagagcatggttttcatactactcccccgtagtatatatgactttagcattcccgtataatagtttacggggtgctttttatgttataattaagtgtatatagtaggagtgaactatatagcctgttaagtggcctagtaacctaacacttatcctgcaattgatatcctttttgcccttcactcgatacatatatctcaacaacatagaaatattacagtcgctacaccgcatcttaaatggtgtggttatttttattggaagtgtgtatcaggtatcagtaatgttaaaacaccagctaaaaatgaaaagaattcaccagtgccagcaggttatacactcgataaaaacaatgtaccgtataaaaaagagactggttattacacagttgccaatgttaaaggtaataacgtgagggatggctattcaactaattcaagaattacaggtgtattacccaataacgcaacgatcaaatatgacggcgcatattgcattaatggctatagatggattacttatattgctaataatggacaacgttgttatatagcgacaggagaggtagacaaggcaggtaatagaataagcagttttggtaattttagcgcactttgaaaaaagtgtgtaaagtttcatatgaagttaattaatttattatagaatagtttgaaattatgctataatcattttagacacagcaatgtgttcaaattttcatctattcataagctagccttcgggctagtttttttgtgctatatatttgttttaattaaataaaattagataatgcaatagtagccattttatgttaatattaccttgggcgttttcaaggagcgcctttcattttttattgtattgctccccttcgggctagtatattaaatttatttttgcgctttccaaatcaatgtatatgtgttatattgtttatgggaagtaggtaagcatttcggtgcttacctttttttgtttttctataaatacaataaggtatgtcaatttgataatttattaattttcatttaataagaagatctatatagttaatgaataattaatgtactttttttagttagtcattaaaataaattagtactaattactaaggagaataaaaaatgaaaattagaaaatctatacttgcgggaactttagcaatcgttttagcatcaccactagtaactaatctagataaaaatgaggcacaagctagcacaagcttgccaacatcgaatgaatatcaaaacgaaaagttagctaatgaattaaaatcgttattagatgaactaaatgttaatgaattagctactggaagtttaaacacttattataagcgaactataaaaatttcaggtcaaaaagcaatgtatgctcttaagtcaaaagactttaagaaaatgtcagaagcaaaatatcaacttcaaaagatttataatgaaattgacgaagcactaaaaagtaaatattaaaaaaccacccgtaaagggtggttttaattttctagataatataaaagtgttcataaataaaacagtataggtaaacaataaagtattgaaaaaagtaagtttaatatgaaaattgttaaatgaacgacatcttttgtttttataaatatcaagaaaataatcaaactcaaaataaataacgtaactgtagtcataggcgtccatacataatcagcattagtcattaagaatggtgcggccattatgaaaaaatttataatgcagatgaaatagacaattagactataaattaggtaaataacaatacacacccttcataaataaataatttaaatcctatatattttaacaaaagtaaaacacagaagtgtagaaaataaaaatattggtaaataaaatcaataagtttaaccaatatgttgctcgcttcataccgtatattgcaacaaaaattccgatcaagaaaaatatagcccctatgataaaacagaaatccgatgctgaattattaaaaaatgaggtgtttagagttagaaaatgagttaatgagttgactataactaataagatattaattatatttgtatggttcttcacatgatacctccaagtaaaaaaatctaattaataaagtgaatgcttgatgaacaagcagttattccaaacagaatcaataagaaaagtagaatcaacatgctaatgccccataaacaacccttttcactttcactattattaatttcttgacttcttttaaagatattattacttttacattctttagttgttttaaatttcacgtttttattacttccttttgtttaaaagtttacaatgaatttttgattataataatatattcaaaatagtactatctagtttgatatgtcaagcaatattattataaaattggaattctgagttgtctactctaatttattatatttacctataaaaatacacctcaaaaaatagatttttcagtctagcttttggggtgtacattccacacaaacatgtgattattttgatgtttctattaaacttgtaattttaaatttaaagtccctaaaaagtccctaaaatttttattttatatgaggtattattgataatgataaagttataaaccttgatattatgctgttttactttttgaatgataagtaattttatgttaaaagtctccagtttggatacatagaaaccttgtaacaacagtatttattgggtttggagtccctaatgggtccctaaattacatactttctaaattttagttgttttttgtcctcttcattaaatttttcttctaacaaatgagaatacacggatgtagttattgctatatttttatgacctaatcttttagaaatgtaatgtatagatacaccttttgctagtaaataagaacaatgagtgtgtcttaatgcgtgcgatgtaataattggtatattattgactctacaggctgatttcaaagcattattgatagcatgaaggttaattatagatccggcttctttgaaaatgtaaccatcatagctaattgcaaatgtacttatgacgtccataatgtgtttcatatcagatttagcgatactgatatatctaggggaagtatcggtttttcgctcgtcaataaatatagtgtttttcacttggttgatatgctcaatctttatatttcttgcaccactgacacgacaacccgtacaaatcattatgaatagcgctaatgatgaacgagttctcttctttctgacgtgatcttttagtatttcatattcagttaccgagatgaatttttcttgttctgacttcgtaggttttccggctttataattaactttataagcgggatttttaaaaataagcccatcatataatgcgtcatctaaagctgaccgaatagcaccgtttgtttttcttatagtttcttttgcgtgttcttttgaataatcgtttatgaatttctgataaacttgtctatttatctttgataactccattttacctattttatgtttttgtatatgttgtaatgcatttctataatgacggtaggtattttctttaacaacaggttgtttatacgttttaatccaattttcgaagtattcttcaagagttatatagttatctatattaaaaccacttcttaactcatttaacttgtctagtccagcagaattagcttcacgctttgttctaaaacctttcttacggtatctttttccttcatacttaaattcatattgccattttttaccatcgtaacaacgtgttttcatgcgttccctcctcaaaattggcaaaaaataataagggtaggcgggctacccatgaaaattgtataaaaaaagacgcctgtataaaatacagacgccacttatagttataagattacatggttaattaccaaaaatggtaacgaatatatacgtgttttaaaggataaacctttaatatattaaaattatatcatcttatatcaggaatctgcaatatattattattaattctatttatcagtaacataatatccgaagaatctattactggatttttaattttttggggtaaaacttttcttatgcgaaacttactaatcggctggaaagaatttatgcaagcgtaactattaccttttaatttttttaccttatcaattgctgatactatgttattaatgtttctgtcaattttatttaatttattttcaatttctaaactatcagatataaattcactaaaataatctttagtgatgaattctgtgttgtttttttggtattttttatcgaaaacttcttttaatatagctgaattattttgcgcgctaattaaatttaaaaacaatcttaaataatactcccatttcaaatcaaaattcatctttaaatactttttgttttctttagaagataagggaataacatttactatatcttccgtattagaatcatttttattcatcactattgcaaagtgtgaattagagaattctttattaacgtttataccgaaatctacaaaaactatttctccttgtttaaactttggataaaaacctttatggtttttttcaccttcaaatctcttgagtaaatagtgaatatctgaatctaattttttaaattttggatttccagaagtttttaatttattaatgcgtttttctatattatgcgtcatcatttctcctttattctcgctcacactctcaccaccattcaacgtctacacttgtagacgttttttgattagtaaaatcataatgaatcttctttggttaacttatcgccatctattttttgtgaaataaattccaagtatttacgcgcattatgtgacgataaatctttaggtaactcataagtgaatggttgattaccactagttaaaacttcatatactatagtttctttttttattttgcaattagttattttcattataaacttcctttcaaacactgctgaaatagacgtcttttatattaaagcgccacacaggcgctgttaatcacaatttagttctatcagtgattttagactccataactctttgatgtgattctttagcttctcgaatcatatctttaaattcttgactgtctataaaagctttagcctcttctatttgctcttgagtaagttctttaccaccagtattgatgtgtaagtgttcaatttctttataagtactcattttttcgactcctgttcttcaagttcacttttagttataggtaaaccattgttcaatctataagtcagttcttcttctgtataaaaggggatttcaaccatttcccactcttcaatgttaatgtcaacttctttaaaatccatgttaaaccctcctgtgaaatgaattttctattatttatagtaattacttataaaaatacaatctttacctatctcaaactttgtattctaaatgtactcgtaatccatagtctgattctttagtaacgattttctcttctaaataatctaaagttttatacttaccaccattaatatatgcgttacaagaaacgatgttgtccatatgattgactaatcttgaagcatactctctaggtacatatccaacgtgaaattcagagtattcatttgaaatcataacttttatcgcgttttcatcataaggattatccggttctttttgtaagaatacaccaggaataacctcgtaatcagaaatttcatacaccttgtcttcataaagtaattcttctttaagttcatttcctttcaaatcactatataagaaaaagaaatcgtcgttatttttcattttcttgataagtttctttaattcttttctacgaccttcataatttaatcctacgacgtcgaaaatttcaactttagtttgttcatcatcattaataggtagacaatcattcgagataattgtttccttattcttagataattgcatataagtttttaaaattgagatgaatcctgttaaaggagagtttgttacgaaataaactgttaattttctattatcgtttaatgttaaaaaagcttggtttttccaaatagtaacaacagtgttataatctatcacctctgataatgagattttgaatatataatcttcttctttccttataaaacaaatctcttcatgtgaaatgaatatagaacccattctcctcttgttttcgtcgaattttatgtcgcaactgtcgctgattattggttcaaagtaactgtattgatctgataatattttttcatcttgctttctaggtttcattttactacctcctataaaataacttttccaactaacctcacactttcgttatcataaaaatataaatctttatactttttatttaaagaaaccaacgttaatctattatcttctacataaactttctttacgtaagcatctccatttataataaagacgcctatttgtccatctttgatagtgtgagatttttcaatgaatataatttgtccgtttttaaataacggctccattgagtctccatttacttttaaagctatatcatgtgcggggacataacctcttacgaattcttttgaaataggctcgttatataatctttcgccaataccagctgacgcacaaccatatatatccacttcggatttttcttgaatgtaagaattgaaatctaccagattatcactgtcattattttgttcttctaattgattagtcgcatattttagtacattgctttgtcttggaggcgtgagtttactgtatatggaagtgatgtcgttattttcaatttttctattcttagaaatatcaaaccccataagccacgcttcgttaacgtttaaagcctttgctagttcaaagactttgtcttgtttcgcttcatattttccgtttaaataatcgctaattgagtttctaccaataccagtccttcttgatagctctgattgagatatcttccgttcagacataatttgctttaatctatccttaaaactgttcatatttctgaacacctcctaagaacataatactacgtacaatgacgattatcaataatttttaacaaatattgtacagaaaaatgtattttatgtgttgacttatttgaacaaaggtgttttaattgatttgtacagaaaaccgaacaagaagggaggtgagtttatgatatacaatttcgattatagtttgctgtacgaaagaatggcagagtatagatatagccaaagttctttagcgaacgcaatccctatttcaaggacatctattaatcacaagttgcaaggaaaaaatttatttacacaatgggaaataaaacgaatctgtgaattattagaaatcccaccaacaaaagtaggtagatatttttttgaacaaaatgtacagaaacctgtacaaatgtcgtaacaggaggaaactatggaacaaatcacattaaccaaagaagagttgaaagaaattatagcaaaagaagttagagaggctataaatggcaagaaaccaatcagttcaggttctaattttcaacaaagtaagaatcagccataacgattttgatgaaattaataaaaagtttgcttatacagaacgtttaagaggtgctgacaatctcggcttaggacatccattatctttgaagaaatatcaacacggaataggatgttatgaaaattacaaagcatacgctagtgaaattcatgaccacattagaaaacttacattatcagcttttggtgtaacgcttaattctgatttaaaagagagtgaatacgatgaagctagcagaatgtatgacatgttgaagaacttttatttatatcgttaccaaaaacgaattgaaaccttgtcaattgaagatttcgaataaaggaggaactacaaatgttacaaaaatttagaattgcgaaagaaaaaaataaattaaaactcaaattactcaagcatgctagttactgtttagaaagaaacaacaaccctgaactgttgcgagcagttgcagagttgttgaaaaaggttagctaaattcaacggtaaggatttgccctgcctccacacttagagtttgagatccaacaaacacataagttttagtagggtctagaaaaaatgtttcgatttcctcttttgtaacagtttcaattccttcatatcctggaaaaacaattttctttaaatccgaaacatgtttttttgaaccatcctttaaagtaactagaagtttcatacttatcacctccttaggttgataacaacattatacacgaaaggagcataaacaatatgcaagcattacaaacaaaatcgaacataggagaaatgttcaatattcaagaaaaagaaaatggagaaatcgcaataagtgcaagagagttatataaagctttggaagttaaaaagcgttttagcgcttgggcagaaattaacttgaagcatttcaaagaaaatagggattttacaagtgtacttacaagtacggttgttaataacggagctgtaagacaactagaagattatgctttaacacttgatgtagctaaacatgttgcaatgatgtcaggtacagaaaaaggttttgattttagagagtacttcatccaagttgaaaaagcatggaatagcccagaaatgattatgcaacgtgctttaaaaattgctaacaacacaatcaatcaattagaaacaaagattgaacgtgataaaccaaaaattgtatttgcagatgcagtagctactactaagacatcaattttagttggagagttagcaaagatcattaaacaaaacggtgtaaacatcgggcaacgcagattgtttgagtggttacgtcaaaacggattccttattaaacgcaagggtgtggattataacatgcctacacagtattcaatggaacgtgagttattcgaaattaaagaaacatcaatcacacattcggacggtcacacatcaattagtaagacgccaaaagtaacaggcaaaggacaacaatactttgttaataagtttttaggagaaaaacaaacatcttaataggagaacactatggaacaaatcacattaaccaaagaagagtgtgtcgaacaatgcatcaataaagacttaaaacttttagattatcgagttcaacaaattttagaaggtgttctatcagaaagtaccacatacggtgatgcaagaaataaattagaaacattgaaaattattgctgaatctcattttaaaaccgaacatgcttcagttatttacaaattagcattgaaaaagttagacaaaaaaatcaacgccactccaattaaagagtgacgaaaaaggaggatttcaaatgtttaagattttaaatgatataaaaacttctttaaaaaaccatccttggggttggaaagagcacttaccttatttactgatgttaactctgtcacttgtggctctgattttcggtgttctgtccgcgattctatgataacaggttttatatagattccttacctcctctctgtaggagataacaatattatacacgaaaggaatgatagaaatgccacatgtattaaacgtaaccgttccaatacctgaaacacacgtgcttatcacaaaagatgaatatgaagagttaatagcttactcattagaccctgtatggaacatgagcgacttaaagaagaaattaaaaattgcatctgatgagactatcaaggacagattactatttcatcctagatttgaaaaagaactaagagcgcaaggaattgtgcattacccagatgagaattttaatcgctggagatttaacgcaagaaagatgaataaattcgtcgatgagcatttcaatgaaatatataaggagagaataaaatgagtaaaacttataaaagctacttattagcagtattatgcttcacagtcttggcaattgtacttatgccgtttctatacttcactactgcatggtcgattgcgggattcgcaagtattgcaactttcatattctataaagaatacttttatgaagaataaaaaaactgctacttgcgccaacaagtaacagtgacaaacgattaacaaaattaattcatgttcaatataaaacgaaataaaggaagtgtcaacaatgtactacaaaattggcgatgtatgtcaaaaagtaattaatgtagacggattcgattttaaattagcagttaagaaacaagattacagcattctagtgaatgtcttagatttagaagatagatttatcgacagtataaatataacagatgagaatgatctatacacagcattagacatattaaatcaatctatttatgaatggattgaagagaacacagacgaaagagacaggctaattaacttagtcatgagatggtaggtataagcatgagagatacagaaagaaatatattgaatatttttaaaacgttattcgacgaatatactttgtcaaaccaacgagcattattggaaattgaacgtaatcatcacggatacttatcgattaatttcttgcactatcacgacagttacaaaacgaacaataagcttgtacagatacatgaaatcaatccggacagccacgaacgaataaaaaatttaattatcgaggtgctaagaggtcatcggaagattaaaaaaggagcatgaggatggaaataaaaataaataagttaactatatcaaactttgctggaatcaaagaagaaagctttaactttaacggcaaagatgcaaaaatatacggcaataatgcaacgggtaagactacgacagcaaccgcattacaatggctgcttttcgataaaggtttggacggatcaaccaaatcatttaaccctgtacctttaaacgaaaaaaacgaagaaaattatgagttaattccgactgttttcgcagaatttgaaatcgacggaaaaattacgacttttaaaaaagagtcacatcctaaatacacaataaatcaaaaaacgaatcgcaaggaatactcacgaagtcgaacgaagaaacaatatatcaatgatgaatcaataaaagtaaaggattataaagctcgtattgatgaactgattgatgaagatgtattcaagttaattacgaaccctcaagcatttaacttactagattggaagaaacgaagaagtttgttgtttgaaatcgctaaaccaatcaatgatgaggatgtcattaaaacaaatgatgattttaaagaactaaataatattcttggagatcacgaaattgaaacaaagaaaaagattcttacagacaagataaaacagattaacaaagatatcaaagacattccgatacgtattaaccaaacacaacaaaataagcaggatgtacctgaattcgataatgatagatacgcaattatcaaacaagaaattgagcaacttgaaaatgagcgtatagatattcaaaacggtaaggaagaaattaatttgcgtaatcaattagctgataaacaatcagaattgaaacgcatagaagacaataacagcgcaagtaatgagaacaaaatccatgctttaacaaatgagctacacgttgaaaatggaacggttgcgaatcttaaaacaagattaaagcaaaacaaacaacaaattacacatgaagaaaatcgacgtaatcaattattagaaaatcataaaggattaaaaagtgatttagaaaaagctaaaaatcaaaaatttgaatatcttgatgacaatgtatgtagttgttgtggtcaacagttaccagctgaacaagtgagtgaggtaagagaaaaagcattgcagaaattcaatgcaaacaaatcgaaagaattagaaacaatacaaacatctatcaatcacattatttcagagggcaagaaaataaagccaattatcgagaaattagaggatgacaacaataatttacaaattaaaatcaacgaagcagaagagcgttcagcaagaatacaaaacaaaattaataagttgaaaacaactcacgttgacgttacgcaaactgacgaatacaaagcagtaatgttagagataaatgagattaatcaaaaacgctctaacatcaggaaaactattcaagataaagtttcaggaatagatgacaaaataagcgaacttactcaagaaaaatcagaaattgaagtgtcaatatcaatcgaaaaatcaaataaacatctagatgatgttatttctgaattaagaaatgaagaagacagattattggatgaaaaagaaaagtattcacatgacctttatatcttaaaagaatttacaacaacaaaagtcaaaatgcttactgaaaacatcaataacgaatttgatattgctgaatttaagctattcaataccttagttaacggcgaattagaagaaacatgttcaacaacggttaatggtgtcgagtatgacagcggtttaaataacgcctcaagaattaatgttggcttagatatcatcaacacactatcaaaacattttaaagttacagcgccaatatttattgataatgctgaatcagtaacagagcttatcaaaacagaatcacaacaaattcaattgatagtaaatgaacaagataaaaaattaagaatggagactatataaaatgactgaaaataataaattacaaactattgaacaacaattagtacaagaaaagaacgtatctgacaacgtattaaacaaagtgagagttttagagtcacaaggcaatttggaattgccaaatgattattcaccaagtaatgccatgaaacaagcatggttacaaatcagccaagataacaaattaatgagttgtaacgatacaagcaaagcaaatgccttattagacatggtaacgcaaggtttaaatccagctaaaaatcaatgctactttattccttacggcaacaaaatgcagttacaacgtagctatcacggtaatgtaatgatgttaaaacgtgatgcaggtgctcaagatgttgttgctcaagtgatttataaaggcgatacattcaagcaagaaatgggagaaacaggacgtatcaaagcgattaaacacgaacaagacttctttaacatcgacaaagaaaacattatcggtgcgtactgcacaatcgtatttaatgatggacgagataactatattgaagtcatgactattgaacaaattaaacaagcatggatgcagtcatcaatgattaaagatgaaaaagcattacaaaattctaaaacacataataatttcaaagaagaaatggctaaaaaaacagttatcaatagagctgctaaacgttatatcaacacatcaacagatagcaatcttttcaaatacgcacaagaatccgaacaacgtcaacgcaaagaagtgttggacgcagaagttgaagaaaatgcaaatcaagaacaattggactttgaacaaccagttcttgaagaagcacaatacacagaattagaaaatgataagcctattgatgtatctgactttgaagaaataaaagaacctgcaacagaaaaagaaagcgaagaagagccattttaattgaaacaatagcaactggttcaagtggtaactgctacgtcttaaatgatggacgtactacgttactatttgaggcaggtataaaatttgaacgtgttcaaaagcatttcaaatataaaacaagacatatagcagggtgtcttatcacacacgaacatggtgatcatgcaaagtacacaaagcagtttgtcgacaatggtgtaataagctatatgactgctggaacacaacaagctatgtaatttgaaagtcatcgcttatgcacgattaaggcaaagcaagagctgcgaataggtacatggtcaattctaccgtttgacatcgaacatgatgctaacgagcctgtggctttcttattacaaagcacactaggttataaggttctgtatgttactgatacaaagtatttgaaatacaaatttaatggcattacgcacatgatgctagaagttaattatatctatgaacaaatgcaagaaaacataaaaaacggcagtgtgcacagcacattagcaaacagaattatggagtctcattttagcttagaacatgctatcggaatgttaaaagcaaatgatttaactagactcgaagaaatacatttaattcatttaagtagtcaaaattcaaatgcaaaatacattaaaagtgaaatacaaaaagtgacgggcgcgcccgtttattttggaggtttataaatgctaaacagaacaatattagttggtcgtttaactagagacccagaattaagaaccactcaaagtggtgtaaatgtagcatcattcacattagcagttaaccgtacatttacaaatgcacaaggcgagcgcgaggcagactttattaatatcatcgtatttaaaaaacaagcagagaacgttaataaatacctatctaaaggatcgttggcgggcgtagatggtaggttacaaacgcggaactatgaaaataaggaaggtcaacgtgtatacgttacggaagttattgctgatagtattcaatttttagaaccgaaaaactcaaatgacactcaacaagatttatatcaacaacaagtacaacaaacacgtggacaatcgcaatattcaaataacaaaccagtaaaagataatccgtttgcgaatgcaaatggtccgattgaactaaatgatgatgatttaccattctaatttaaccggtttgaaagtgaggtgtgtatatgactggttggataagtattgatcgctcaattcaaaatcattggctatttaaagaaaagagaacattttcaaagttcgaagcatggatatatttactcatggaagcgaatcattcagaggcaaaagtgcctataggaaaccaaattgtaaccgttgaaagaggacaaagattaacatctattttgaccttgtctgacctttttaactggtcacgatttaaagtgaaaaccttccttgacttactcgagagtgatggaatgttagaagtcaaaacaacatcaaaatatacccttataaccattgtcaattatgacttttatcaaagtgagcagggcaggaaccaacatcaaaacgacatcaaaccaacatcaaaacaacatcagtcaaacatcaacccaacatcaaaacaacatcaaaccaacacaaacaataatgataataaagataataatgaaaagaatgtgaataatgagaagaagaaggtaaccgccttcgacttcttccaagataacggattcggtttcataactccttacaatttagacgatttaaattactatcttgattcatttgaaaatgattcagatgaaatagttaccgcatcacttaaaatcgctaaagacagaaacaaggttacttggggatatgctaaaagcattttgaatacttggcttaatgcaaacttgaaatctattgaacaagtacgtgcatttgaaaagcaacaacttgaaagcaaaaaacaaaattataaacctttcgttaaacaatcaaaagaaaaaacacccaaatggctcacagacagcacgagagaaacgaaaacgccggaagtagatgaaaaccttgagaaagacagagaagcttttattaagcgtctaaatagcaaatgggagtgattgaaaatggatgcatttgataaatactatctatttgatcatgacggcaacaaaatgttttcagttacaccacattttaaagatggacggcatttagttgttggattaaaacatacaaaattcaatggtcgacgttggtacttagatgattatgaattaaaaacacttattgataatgaacaaatggagttaggacaccaaacaagcttatttgaatatatatgagggattacatggagatagaaattaaatttaacgaaactttcgaggcacctatgggctcgcctcgaccgcgttttagcacaaaaggtagatatgcacacatatatgcctacaaaatatacagaacataaaaaatatttacaaaatcaaatgccaaagctaaatctagaaaatgcattaaaaattgaattagagttttactttactccacctaaatcatggtcgaagaaaaagaaaactcaagcgattggacaattaaaagtaactaaaccagatatcgataatttgatgaagacagttctagacgcttgtaacaattatttgtggaaagatgacaatcaaattgcagaaataactagctcaaagcgttatggaattgagcccaaaataatcatacgaatagaagaaatataagaggtggataaaatggcgagaaaagcaaggattgtaacaataaatgataaaccatataggtttaccaaatctgaaatggaattaatagaaagtcacggtataaccgctggaatggtttctaagagagtaaaagacggttgggaactacatgaagcaatggacgcaccagaaggtacgcgtttaagcgagtacagagaaaagaaaacaatagaaagactggaacaagctagactcgaacgcaaattggaaagaaagcgaaagaaagaggctgagctaagaagaaagaagccacatttgtttaatgtgcctcagaaacatccaagaggacgttatgcgtgctacctgatggaaaacgacatattcgtgaaagttaagaagtagatcatgacagataacgcacgcaaagaatacctaaatcaattctttggatctaagagatatctgtatcaagataacgaacgagtggcacatatccatgtagcaaacggcaattattactttcacgggcatatcgtaccaggttggcaaggcgtaaagaagacgtttgatacagccgaagagctagaaatatatataaagcaacatggtttggaatacgagaaacagaagcaactaactttattttagtaggagatggaaatgatgaataaccgctataagtgctagtgcgtataacggtaatgacacagagggattactaaaagagattgaggacgtatataagaaagcgcaagcgtttgatgaaatacttaagggtttacctaatgctatgcaagatgcactcaaagaagatattggtcttgatgaggcagtagggattatgacgggtcaagtggtctataaatatgaggaggcacaggaaaatgaataacacattaacaattgatcaattacaagagttattacaaatacaaaaggagttcgacgatagaataccaacgctgaacttacgagatagcaaaatagcatatgtagttgaattctttgaatggtttaatacattggaaacgtttaagaactggaagaagaaaccaggtaagccgttagacgtacaacttgatgaattagctgacatgttggcgtttggattgagtattgcgaatcaagtaggagtgtcatcagaagagataaaagaagcgattgaatcaagttttaaagatacagaatttcacaaaatgtttaattttaaagataaagaatttgctcaagacgcagttgttagtacaccacagataatattcaaagaattttatcccgaccaacaagcaattgttatagtgatagacatagcttacaacttatattctatcgaccaactcattgacgcatacaaaaagaaaatgaaaaggaaccacgaaagacaagatggaacagcagacgcaggaaaaggatacgtgtaaagacatcttagatcgagtcaaggaggttttggggaagtgagcgacatgttagaaatatttttaatagggtttggcgtttatctcttttatcgcatagcaattatttttcttaagagtaaaaagactatacacacaaacatatatgaaatgttaatgcttgctactatctttatgatatctacatttgcttataaacatcaaaagacgcatatcttaatagcatttttagtaatgttttttatgagtaagctcaaacaagttcaagggagctatgaggaatgacacaatacttagtcacaacattcaaagattcaacaggacgtaaacatacacacataactaaagctaagagtaatcaaaggtttacagttgttgaggcagagagtaaagaagaagcgaaagagaagtacgagaaacaagttaaaagggatgcagttattaaagtgggtcagttgtttgaaaatataagggagtgtgggaaatgattaaaaaacttaaaaatatggatgggttcgacatctttattgttggaatactgtcattattcggtataaccgcattgctacttgttgtcgcattgcctatctatacagtggctagttaccaaaacaaagaagtacatcaagggacaattacagataaatataacaaaagacaagataaagaggacaaattctatattgtattagatgataaacaagtcatcgaaaactcagacttattcttcaaaggaaagtttgatagcgcagacatacaagctaggttaaaagtaggtgataaagtaaaagttaagacgattggatatagaatacactttttaaatttatatccggtcttatacgaagtaaagaaggtagataaaaaatgattaagcaaatactaagattattattcttactagcgatgtatgagttaggtaagtatgtaactgagcaagtatatattatgatgacggctaatgatgatgtagaggcgccgagtgattacgtctttcgagcggaggtaagtgagtgatgtggattactatgactattgtatttgctatattgctattagtttgtatcagtattaatagtgatcgtgcaagggagatacaagcgctcagatatatgaatgattatctacttgatgaagtagttaaaactaaaggatacaacgggttaaaagaatacaggattgaattaaagcgaatgaataacgatattaaaaagtaatttatattatcggaggtattgcattgaatgataaagattgagaaacacgatatcaaaaagcttgaagaatacattcagcacatcgataactatcgaagagagttgaagatgcgagaatatgaattacttgaaagtcatgaaccagataatgcgggagctggcaaaagtaatttgccgggtaacccgattgaacgatgtgcaataaagaagtttagtgataacaggtacaatacattaagaaatatagttaacggtgtagatagattgatagatgaaagtgatgaggatacgcttgagttattaaggtttagatattgggattgtcctattggttgttatgaatgggaagatatagcacattactttggtacaagtaagacaagtatattacgtagaaggaatgcactgatcgataagttagcaaagtatattggttatgtgtagcggacttttaccctatgtaagtccgcattaaaacagtttattatgttagtatcagattaatatttaaagttattaaatgctaatacgacgcatgaacaagaggcgcatcactatgtgatgtgtctttttatttatgaggtatgaacatgttcaaactaatagtaaatacattactacacatcaagtatagatgagtcttgatactacttaagttatataaggtgaaacattatgatgactaaagacgaacgcatacgattctataagtctaaagaatggcaaacaacaagaaaaagagtgctagaaagagataattatgaatgtcaacaatgtaagagagacggcaagttaacgacatatgacaaaagcaagcgtaagtcgttggatgtagatcatatattatcgctagaacatcatccggagtttgctcatgacttaaacaatttagaaacactgtgtattaaatgtcacaacaaaaaagaaaagagatttataaaaaaagaaaataaatggaaagacgaaaaatggtaaatacccccgggtcaaaaaaatcaaaagcgatcaaaatacttgggg

SEQ ID NO: 7 - DNA, 42325 bp, Bacteriophage 91a/06
accccccctcttataaccattttaaggcaggtgatgaaatggagattatagtcgatgaaaatttagtgcttaaagaaaaagaaaggctacaagtattatataaagacatacctagcaataaattaaaagtagttgatggtttaattattcaagcagcaaggctacgtgtaatgcttgattacatgtgggaagacataaaagaaaaaggtgattatgatttatttactcaatctgaaaaggcgccaccatatgaaagggaaagaccagtagccaaactatttaatgctagagatgctgcatatcaaaaaataatcaaacaattatcggatttattgcccgaagagaaagaagacacagaaacgccatctgatgattacctatgattagtaataaatacgttgatgaatatataaatttgtggaaacaaggaaagataattttaaataaagaaagaattgatctctttaattatctacaaacaacatatatattcacgagatgatgtatattttgatgaacagaaaatcgaggattgtatcaaatttattgaaaaatggtattttccaacattaccatttcaaaggtttatcatagctaatatatttcttatagataaaaatacagatgaagctttctttacagaatttgctattttcatgggacgtggaggcgggaaaaacggtctaataagtgctattagtgattttctttctacgcccttacacggagttaaagaatatcacatctccattgttgctaatagtgaagatcaagcaaaaacatcgtttgatgaaatcagaaccgttttaatggataacaaacgaaataagacgggtaaaacgccaaaagctccttatgaagttagtaaaacagaaataataaaccgtgcaactaaatcggttattcgatataacacatcaaacacaaaaaccaaagacggtggacgtgaggggtgtgttatttttgatgaaattcattatttctttggtcctgaaatggtaaacgtcaaacgtggtggattaggtaaaaagaaaaatagaagaacgttttatataagtactgatggttttgttagagagggttatatcgatgcaatgaagcacaaaattgcaagtgtattaagtggcaaggttaaaaatagtagattgtttgctttttattgtaaattagacgatccaaaagaagttgatgacagacagacgtgggaaaaggcgaacccaatgttacataaaccgttatcagaatacgctaaaacactgctaagcacgattgaagaagaatataacgatttaccattcaaccgttcaaataagcccgaattcatgactaagcgaatgaatttgcctgaagttgaccttgaaaaagtaatagcaccatggaaagaaatactagcgactaatagagagataccaaatttagataatcaaatgtgtattggtggtttagactttgcaaacattcgagattttgcaagtgtagggctattattccgaaaaaacgatgattacatttggttaggacattcgtttgtaagacaagggtttttggatgatgtcaaattagaacctcctattaaagaatgggaaaaaatgggattattgaccattgtcgatgatgatgtcattgaaattgaatatatagttgattggtttttaaaagctagagaaaaatatgggcttgaaaaagtcatagctgataattatagaactgatattgtaagacgtgcgtttgaggatgctggtataaaacttgaagtacttagaaatccaaaagcaatacatggattacttgcaccacgtatcgatacaatgtttgcgaaacataacgtaatatatggagacaatcctttgatgcgttggtttactaataatgttgctgtaaaaatcaagccggatggaaataaagagtatatcaaaaaagatgaagtcagacgtaaaacggatggatttatggcatttgttcatgcgttatatagagcggatgatatagtagacaaagacatgtctaaagcacttgatgcattaatgagtatagatttctaatagaggaggtgagacatgagtattctagaaaagatatttaaaactaggaaagatatatcatatatgcttgatttagatatgatagaagatttatcacaacaagcgtatgtgaaacgtttagcgattgatagttgtattgaatttgttgcgcgagctgtcgctcaaagtcattttaaagtattggaaggtaatagaattcaaaagaatgatgtttactacaagttaaatataaaaccaaatactgacttatcaagcgatagtttttggcaacaagttatatataaactaatttacgataacgaggttttaatcgtagtaagtgacagcaaagaattacttatcgcagatagcttttacagagaagagtatgctttgtatgatgatatattcaaagatgtaacggttaaagattatacttatcaacgtactttcacaatgcaagaggtcatattatttaaagtacaacaacaataaagtgacacactttgtagaaagtctattcgaagattacgggaaaatattcggaagaatgataggtgcacaattaaaaaactatcaaataagagggattttgaaatctgcctctagcgcatatgacgaaaagaatatagaaaaattacaagcgttcacaaataaattattcaatacttttaataaaaaccaactagcaatcgcgcctttgatagaaggttttgattatgaggaattatctaatggtggtaagaatagtaacatgcctttttctgaattgagtgagctaatgagagatgcaataaaaaatgttgcgttgatgattggtatacccccaggtttgatttacggagaaacagctgatttggaaaaaaaacacgcttgtatttgagaagttctgtttaacacctttattaaaaaagattcagaacgaattaaacgcgaaactcataactcaaagcatgtatttgaaagatacaagaatagaaattgtcggtgtgaataaaaaagacccacttcaatatgctgaagcaattgacaaacttgtaagttctggttcatttacaaggaatgaggtgcggattatgttaggtgaagaaccgtctgacaatcctgaattagacgaatatctagtgacgaagaactacgaaaaagcaaacgaaaatggtagtacattgaaaggtggtgatgaagatgaaagtggagattaaaggcgtcatcgtttccaacgaagataaatgggtttacgaaatgcttggtatggattcgacttgtcctaaagatgttttaacacaactagaatttagtgatgaagatgttgatattataattaactcaaatggtggtaacctagtagctggtagtgaaatatatacacatttaagagctcataaaggcaaagtgaatgttcgtatcacagcaatagcagcaagtgcggcatcgcttatcgcaatggctggtgaccacatcgaaatgagtccggttgctagaatgatgattcacaatccttcaagtattgcgcaaggagaagcgaaagatctaaatcatgctgcagaaacattagaacatgttggtcaaataatggctgaggcatatgcggttagagctggtaaaaacaaacaagaacttatagaaatgatggctaaggaaacatggctaaatgctgatgaagccattgaacaaggttttgcggatagtaaaatgtttgaaaacgacaatatgcaaattgtagcaagcgatacacaagtgttatcgaaagatgtattaaatcgtgtaacagctttggtaagtaaaacgccagaggttaacattgatattgacgcaatagcaaataaagtaattgaaaaaataaatatgaaagaaaaggaatcagaaatcgatgttgcagatagtaaattatcagcaaatggattttcaagattccttttttaatacaaaaataggaggtcataaaatgactataaatttatcggaaacattcgcaaatgcgaaaaacgaatttattaatgcagtaaacaacggtgaaccgcaagaaagacaaaatgaattgtacggtgacatgattaaccaactatttgaagaaactaaattacaagcaaaagcagaagctgaaagagtttctagtttacctaaatcagcacaaactttgagtgcaaaccaaagaaatttctttatggatatcaataagagtgttggatataaagaagaaaaacttttaccagaagaaacaattgatagaatcttcgaagatttaacaacgaatcatccattattagctgacttaggtattaaaaatgctggtttgcgtttgaagttcttaaaatccgaaacttctggcgtggctgtttggggtaaaatctatggtgaaattaaaggtcaattagatgctgcgttcagtgaagaaacagcaattcaaaataaattgacagcgtttgttgttttaaccaaaagatttaaatgattttggtcctgcgtggattgaaagatttgttcgtgttcaaatcgaagaagcatttgcagtggcgcttgaaactgcgttcttaaaaggtactggtaaagaccaaccaatcggcttaaaccgtcaagtacaaaaaggtgtatcggtaactgagggtgcttatccagagaaagaagaacaaggtacgcttacatttgctaatccgcgcgctacggttaatgaattgacgcaagtgtttaaataccactcaactaacgagaaaggtaaatcagtagcggttaaaggtaatgtaacaatggttgttaatccgtccgatgcttttgaggttcaagcacagtatacacatttaaatgcaaatggcgtatatgttactgctttaccatttaatttgaatgttatcgagtctacagtccaagaagcaggtaaggttttaacgtacgttaaaggtttatatgatggttatttagctggtggtattaatgttcagaaatttaaagaaacacttgcgttagatgatatggatttatacactgcaaaacaatttgcttacggcaaagcgaaagataataaagttgctgctgtttggaaattagatttaaaaggacataagccagctttagaaggtaccgaagaaacactataaaattttatgaggtgataaaatggtgaaatttaaagttgttagagcttttaaagacatagagcacaatcaacacaagtacaaagtaggggagttgtatccagctgaagggtataacaatcctcgtgttgaattgttgacaaatcaaatcaaaaataagtacgacaaagtttatatcgtacctttagataagctgacaaaacaagaattattagaactatgcgaatcattacaaaaaaaagacgtctagttcaatggttaaaagtgaaatcgtcgacttattgaatggtgaagacaatgacgattgatgatttgcttgtcaaatttaaatcacttgaaaagattgaccataattcagaggatgagtacttaaagcagttgttaaaaatgtcgtacgagcgtataaaaaatcagtgcggagtttttgaattagagaatttaataggtcaagaattgatacttatacgcgctagatatgcttatcaagatttattagaacacttcaacgataattacagacctgaaataatagatttttcgttatctctaatggaggtatcagaagatgaagaaagtgtttaaaaaacctagaattacaactaaacgtttaaatactcgtgttcatttttataagtatactgaaaataatggtccagaagctggagaaaaagaagaaaaattattatatagctgttgggcgagtattgatggtgtctggttacgtgaattagaacaagctatctcaaacggaacccaaaatgacattaaattgtatattcgtgatccgcaaggtgattatttacccagtgaagaacattatcttgaaattgaatcaagatatttcaaaaatcgtttgaatataaagcaagtatcaccagatttggataataaagactttattatgattcgtggaggatatagttcatgagtgtgaaagtgataggtgataaagcattagaaagagaattagaaaaacgttttggcataaaagagatggtaaaagttcaagataaggcgttaatagctggtgctaaggtaattgttgaagaagtaaaaaaacaactaaagccctcaaaagatacgggagcattaattaatgaggtaagttttagtaaacctgaatggataaacggaaaacgtacaattactgttcattggcgaggttctaaagaccgttataaaatcgtacatttaattgaatatggacacgttcaaaaaggaacaggtaaatttatcaaacctaaagctatgggcggtgttaatagagcaataagacaaggtcaaaataagtattttgaaacgttaaaaagggagttgaaaaaattgtgattgatattttgtacaaagttcatgaagtgattagtcaagacagaattattagagagcacgtaaatatcaataatattaagttcaataaataccctaatgtaaaagatactgatgtaccttttattgttattgacgatatcgacgacccaatacctacaacttatactgacggagatgagtgtgcatatagttatattgtccaaatagatgtttttgttaagtacaatgatgaatataatgcgagaatcataagaaataagatatctaatcgcattcaaaagttattatggtctgaactaaaaatgggaaatgtttcaaatggaaaaccggaatatatagaagaatttaaaacatatagaagctctcgcgtttacgagggcattttttataaggaggaaaattaaatggcaataaaacatgcaagtgcgccaaaggcgtattttaacattactggtttaggtttcgctaaattaacgaaagaaggcgcggaattaaaatatagtgatattacaaaaacaagaggattacaaaaaattggtgttgaaactggtggagaactaaaaacagcttatgctgatggcggtccaattgaatcagggaatacagacggagaaggtaaaatctcattacaaatgcatgcgttccctaaagagattcgcaaaattgttttttaatgaagattatgatgaagatggcgtttacgaagagaaacaaggtaaacaaaacaattacgtagctgtatggttcagacaagagcgtagagacggtacatttagaacagtttattacctaaagttatgtttacaaatcctaaaatcgatggagaaacggctgagaaagattgggatttctcaagtgaagaggttgaaggtgaggcacttttccctttagttgataataaaaagtcagtacgtaagtatatctttgattcagctaacatgacaaatcatgatggagacggtgaaaaaggcgaagaggctttcttaaagaaaattttaggcgaagaatatactggaaacgtgacagagggtaacgaagaaactttgtaacaaaaccggcttcatcggaaactgcggtaaagtcggttaatataccagatagcattaaaacacttaaagttggcgacacatacgatttaaatgttgtagtagagccatctaatcaaagtaagttattgaaatacacaacagatcaaacgaatattgtatcaatcaatagtgatggtcaagttactgcggaagcacaaggcattgctacggttaaagcaacagttggtaatatgagtgacactataacaataaatgtagaagcataagagggggcaacccctctattttatttgaaaataaggagagtattataaaatggcaaaattaaaacgtaacattattcaattagtagaagacccgaaagcaaatgaaattaaattacaaacgtacttaacaccacacttcatttcatttgaaattgtatacgaagcaatggatttaatcgatgatattgaggacgaaaatagcacgatgaaaccaagagaaatcgctgacagattgatggatatggttgtaaaaatttacgataaccaattcacagttaaagacctaaaagaacgtatgcatgcacctgatggaatgaatgcacttcgtgaacaagtgattttcattactcaaggtcagcaaactgaggaaactagaaattttatccagaacatgaaataaagcctgaagatttaacatataaagcaatgttgaaaaatatggatactctcatgatggacttaattgaaaatggtaaagacgctaacgaagttttaaaaatgccatttcattatgtactttccatatatcaaaataaaaacaatgacatttcttgaagaaaaagcagaggctttaattgatgcgttttaaccttaaccgtttggttagggttatttttttgaacttttttagaaaggaggtaaaaaatgggagaaagaataaaaggtttatctataggtttggatttagatgcagcaaatttaaatagatcatttgcagaaatcaaacgaaactttaaaactttaaattctgacttaaagttaaccggtaacaacttcaaatataccgaaaaatcaactcatagttacaaacaaaggattaaagaacttgatggaactatcacaggttataagaaaaacgttgatgatttagccaagcaatatggcaaggtatctcaagaacagggcgaaaacagcgcggaagctcaaaaattacgacaagaatataacaaacaagcaaatgagctgaattttttagaaaaagaactagaaaaaacaacaactgagtttgaagagttcaaaaaagctcaagttgaagctcaaagaatggcagaaagtggctggggaaaaaccagtaaagtttttgaaagtatgggacctaaattaacaaaaatgggtgatggtttaaaatccattggtaaaggtttgatgattggtgtaactgcacctgttttaggtattgcagcagcatcaggaaaagcttttgcagaagttgataaaggtttagatacagttacccaagcaacaggagcaaccggcggagagcttaagaagttgcagaattcatttaaagatgtttatggcaactttccagaagacgctgagactgtaggcggtgttttaggggaagttaacacaaggttaggtttcactggcaaagaacttgagagtgccacagagtcattcttgaaatttagtcacataacaggttctgacggcgtacaagccgttcaattaattacgcgtgcaatgggtgatgcaggtattgaagctgatgagtatcaaagtgtacttgatatggtagcgaaagcagcacaggctagcggtataagtgttgatacattagctgatagcattactaaatacggtgctccaatgagggctatgggctttgagatgaaagaatcaatcgctttattctctcaatgggagaaatcaggtgttaatactgaaatagccttcagtggtttgaaaaaagctatatccaattggggtaaagcgggtaaagacccaagagaagaatttaagaagacattagcagaaattgaaaggacaccggatatagctagcgcaacaagtttagcgattgaagcatttggtgcaaaagcaggtcctgatttagcagatgctattaaaggcggtcgctttagttaccaagagttcttaaaaactatcgaagattcgcaaggaacggtcaatcagacatttaaagattctgaaagtggctccgaaagatttaaagtagcaatgaataaacttaaattagtaggtgctgatgtatgggcttctattgaaagtgcgtttgctccagtcatggaagaattaatcaaaaagctatctgtagcagttgattggttttcaagtttaagtgatggatctaaaaggtcgattgttatattcggtggtattgctgctgcaattggtcctgtagtttttggattaggtgcattcataagcacagttggcaacgcagtaactgtattagctccattattagctagtattgcaaaggctgacggattgattagttttttatcaactaaagtgcctattttaggaacagtcttcacagcattaactggtccaattggtatcgtgttaggtgtactggctggtttagcagtcgcatttacaatagcttataagaaatctgaaacattcagaaattttgttaatggtgcaattaacagtgttaaacaaacgtttagtaatttcattcaatttatccaacctttcattgattccgttaaaaacgtctttaaacaagcggtttcagcaatcgttgatttcgctaaagatatttggagtcaaattaatggattctttaatgaaaacggaatttctattgttcaagcgcttcaaaatatatgcaattttatcaaagctatatttgaatttatcttaaattttgtaattaaaccaatcatgtttgcgatttggcaagtgatgcaatttatttggccggcggttaaagccttgattgtcagtacttgggagaatataaaaggagtaatacaaggtgctttaaatatcatacttggctttatcaagttcttttcaagtttattcactggtaattggcgaggtgtttgggacggtattgtgatgatactaaaaggcactgtgcagttaatttggaatttaatacaactgtggtttgtaggtaagattctaggtgttgttagatactttggtggattgcttaaaggtttaatatccggtatctggggtgttatcaaaggtattttcacaaaatcattatctgcaatttggaatgcaacgaaaagtattttcggtttcttatacaatagtgttaaatctattttcactaatatgaaaaactggttatctagtacgtggaataatatcaaaagcaataccgtcggcaaggctcattcgttatttacgggtgtaaggtctaaattcacaagtttatggaatgcgacgaaagatatatttactaagttaagaaattggatgtcaaacatctggaactctattaaagataacacggtaggtatagctggtcgtttgtggataaagtacgtaatatcttcggaaacatgcgtgacggtttaaaatctatcattggtaaaattaaagatcatatcggcggtatggtagatgctattaaaaaaggacttaataaattaattgaaggcttaaactgggtcggtggtaagttaggtatggatgaaatacctaggttacacactggtacagagcacacacatactactacaagattagttaagaacggtaagattgcacgtgatacattcgctacagttggggataaaggacgtggaaatgcccttaatggttttagaaatgaaatgattgaattccctaatggtatacgtgtaatcacacctaatacagacactactgcttatttacctaaaggctcaaaagtatacaacggtgcacaaacttattcaatgttaaacggaacgcttccgagatttcatttcggtactactatgtggaaagatattaaatctagtgcatcatcggcatttaactggacaaaagatcaaataggtaaaggtaccaaatggcttggcgataaagttggcgatgttttagattttatggaaaatccaggcaaacttttaaattatatacttgaagcttttggaattgatttcaattctttaactaaaggtatgggaattgcaggcgacataacaaaagctgcatggtctaagattaagaaaagtgctactgattggataaaagaaaatttagaagctatgggcggtggcgatttagtcggtggaatattagaccctgacaaaattaattatcattatggacgtaccgcagcttataccgctgcaactggaagaccatttcatgaaggtgtcgattttccatttgtatatcaagaagttagaacgccgatgggtggcagacttacaagaatgccatttatgtctggtggttatggtaattatgtaaaaattactagtggagttatcgatatgctatttgcgcatttgaaaaactttagcaaatcaccacctagtggcacgatggtaaagcccggtgatgttgttggtttaactggtaataccggatttagtacaggaccacatttacattttgaaatgaggagaaatggacgacattttgaccctgaaccatatttaaggaatgctaagaaaaaaggtaggttatcaattggtggcggtggcgctacttctggaagtggtgcaacttatgccagccgagtaatccgacaagcacaaagtattttaggaggacgttataaaggtaagtggattcatgaccagatgatgcgagttgcaaagcgcgaaagtaactatcaatcaaatgcagtgaataattgggacattaatgctcaaagaggagacccgtctagaggattattccaaattatcggctcaacttttagagctaacgctaaacgagggtacactaattataataatccagtacatcaaggtatctcagcaatgcagtacattgttagacgatatggttggggtggttttaaacgtgctggtgattacgcatatgctacaggtggaaaagtttttgatggttggtataacttaggtgaagacggtcatccagaatggattattccaacagatccagctcgtaaaaaatgatgcaatgaagatgttgcattatgcagcagcagaagtaagagggagaaagcgagtaaaataagcgtcctagtcaattgtctaatgtaaatgggtttgatgacccaagcttattattgaaaatgattgaacaacagcaacaacaaatagctttattactgaagatagcgcaatctaacgatgtgattgcagataaagattatcagccgattattgacgaatacgcttttgataaaaaggtgaacgcgtctatagaaaagcgagaaaggcaagaatcaacaaaagtaaagtttagaaaaggaggaattgctattcaatgatagacactattaaagtgaacaacaaaacaattccttggttgtatgtcgaaagagggtttgaaataccctcttttaattatgttttaaaaacagaaaatgtagatggacgttcggggtctatatataaagggcgtaggcttgaatcttatagttttgatatacctttggtggtacgtaatgactatttatctcacaacggcattaaaacacatgatgacgtcttgaatgaattagtaaagttttttaactacgaggaacaagttaaattacaattcaaatctaaagattggtactggaacgcttattttgaaggaccaataaagctgcacaaagaatttgcaatacctgttaagttcactatcaaagtagtactaacagacccttacaaatattcagtaacaggaaataaaaatactgcgatttcagaccaagtttcagttgtaaatagtgggactgctgacactcctttaattgttgaagcccgagcaattaaaccatctagttactttatgattactaaaaatgatgaagattattttatggttggtgatgatgaggtaaccaaagaagttaaggattacatgcctcctgtttatcatagtgagtttcgtgatttcaaaggttggactaagatgattactgaagatattccaagtaatgacttaggtggtaaggtcggcggtgactttgtgatatccaatcttggcgaaggatataaagcaactaattttcctgatgcaaaaggttgggttggtgctggcacgaaacgagggctccctaaagcgatgacagattttcaaattacctataaatgtattgttgaacaaaaaggtaaaggtgccggaagaacagcacaacatatttatgatagtgatggtaagttacttgcttctattggttatgaaaataaatatcatgatagaaaaataggacatattgttgttacgttgtataaccaaaaaggagaccccaaaaagatatacgactatcagaataaaccgataatgtataacttggacagaatcgttgtttatatgcggctcagaagagtaggtaataaatttctattaaaacttggaaatttgatcacattaaagacccagatagacgtaaacctattgatatggatgagaaagagtggatagatggcggtaagttttatcagcgtccagcttctatcatagctatctatagtgcgaagtataacggttataagtggatggagatgaatggattaggttcattcaatacggagattctaccgaaaccgaaaggcgcaagggatgtcattatacaaaaaggtgatttagtgaaaatagatatgcaagcaaaaagtgttgtcatcaatgaggaaccaatgttgagcgagaaatcgtttggaagtaattatttcaatgttgattctgggtacagtgaattaatcatacaacctgaaaacgtctttgatacgacggttaaatggcaagatagatatttatagaaaggagatgagagtgtgatacatgttttagattttaacgacaagattatagatttcctttctactgatgacccttccttagttagagcgattcataaacgtaatgttaatgacaattcagaaatgcttgaactgctcatatcatcagaaagagctgaaaagttccgtgaacgacatcgtgttattataagggattcaaacaaacaatggcgtgaatttattattaactgggttcaagatacgatggacggctacacagagatagaatgtatagcgtcttatcttgctgatataacaacagctaaaccgtatgcaccaggcaaatttgagaaaaagacaacttcagaagcattgaaagatgtgttgagcgatacaggttgggaagtttctgaacaaaccgaatacgatggcttacgtactacgtcatggacttcttatcaaactagatatgaagttttaaagcaattatgtacaacctataaaatggtattggatttttatatagagcttagttctaataccgtcaaaggtagatatgtggtactcaaaaagaaaaacagcttattcaaaggtaaagaaattgagtatggtaaagatttggttgggttaactaggaagattgatatgtcagaaatcaaaacagcattaattgctgtgggacctgaaaatgacaaagggaagcgtttagagctagttgtgacagatgacgaagcgcaaagtcaattcaacctacctatgcgctatatttgggggatatatgaaccacaatcagatgatcaaaatatgaatgaaacacgattaagttctttagccaaaacagagttaaataaacgtaagtcggcagttatgtcatatgagattacttctactgatttggaagttacgtatccgcacgagattatatcaattggcgatacagtcagagtaaaacatagagattttaacccgccattgtatgtagaggcagaagttattgctgaagaatataacataatttcagaaaatagcacatatacattcggtcaacctaaagagttcaaagaatcagaattacgagaagagtttaacaagcgattaaacctaatacaccaaaaattaaacgacaatattagcaatatcaacactatagttaaagatgttgtagatggtgaattagaatactttgaacgcaaaatacacaaaagtgatacaccgccagaaaatccagtcaatgatatgctttggtatgatacaagtaaccctgatgttgctgtcttgcgtagatattggaatggtcgatggattgaagcaacaccaaatgatgttgaaaaattaggtggtataacaagagagaaagcgctattcagtgaattaaacaatatttttattaatttatctatacaacacgctagtcttttgtcagaagctacagaattactgaatagcgagtacttagtagataatgatttgaaagcggacttacaagcaagtttagacgctgtgattgatgtttataatcaaattaaaaataatttagaatctatgacacccgaaactgcaacgattggtcggttggtagatacacaagctttatttcttgagtatagaaagaaattacaagatgtttatacagatgtagaagatgtcaaaatcgccatttcagatagatttaaattattacagtcacaatacactgatgaaaaatataaagaagcgttggaaataatagcaacaaaatttggtttaacggtgaatgaagatttgcagttagtcggagaacctaatgttgttaaatcagctattgaagcagctagagaatccacaaaagaacaattacgtgactatgtaaaaacatcggactataaaacagacaaagacggtattgttgaacgtttagatactgctgaagctgagagaacgactttaaaaggtgaaatcaaagataaagttacgttaaacgaatatcgaaacggattggaagaacaaaaacaatatactgatgaccagttaagtgatttgtccaataatcctgagattaaagcaagtattgaacaagcaaatcaagaagcgcaagaagctttaaaatcatacattgatgctcaagataatcttaaagagaaggaatcgcaagcgtatgctgatggtaaaatttcggaagaagagcaacgcgctatacaagatgctcaagctaaacttgaagaggcaaaacaaaacgcagaactaaaggctagaaacgctgaaaagaaagctaatgcttatacagacaacaaggtcaaagaaagcacagatgcacagaggagaacactgactcgctatggttctcaaattatacaaaatggtaaggaaatcaaattaagaactactaaagaagagtttaatgcaaccaatcgtacactttcaatatattaaacgagattgtccaaacgttacagatggaacaacaatcagatatgatgataacggagtggctcaagctttaaatgtggggccacgtggtattagattaaatgctgataaaattgatattaacggtaatagagaaataaaccttcttatccaaaatatgcgagataaagtagataaaaccgatattgtcaacagccttaatttatcaagagagggtcttgatatcaatgttaatagaattggaattaaaggcggtaacaataacagatatgttcaaatacagaatgattctattgaactaggtggtattgtgcaacgaacttggaaaggcaaacgatcaaccgatgatatattcacacgtcttaaagatggacatctaaggtttagaaataacaccgctggcggttcactttatatgtcacattttggtatttcaacatatattgatggagaaggcgaagacggaggttcatccggtactattcaatggtgggataaaacttacagtgatagcggtatgaatggcataacaatcaattcctatggtggtgtcgttgcactaacgtcagataataatcgggttgttctggagtcttacgcttcatcgaatatcaaaagcaaacaggcaccggtgtatttatatccaaacacagacaaagtgcctggattaaaccgatttgcattcacgctgtctaatgcagataatgcttattcgagtgacggttatattatgtttggttctgatgagaactatgattacggtgcgggtatcaggttttctaaagaaagaaataaaggtcttgttcaaattgttaatggacgatatgcaacaggtggagatacaacaatcgaagcagggtatggcaaatttaatatgctgaaacgacgtgatggtaataggtatattcatatacagagtacagacctactgtctgtaggttcagatgatgcaggagataggatagcttctaactcaatttatagacgtacttattcggccgcagctaatttgcatattacttctgctggcacaattgggcgttcgacatcagcgcgtaaatacaagttatctatcgaaaatcaatataacgatagagatgaacaactggaacattcaaaagctattcttaacttacctattagaacgtggtttgataaagctgagtctgaaattttagctagagagctgagagaagatagaaaattatcggaagacacctataaacttgatagatacgtaggtttgattgctgaagaggtggagaatttaggattaaaagagtttgtcacgtatgatgacaaaggagaaattgaaggtatagcgtatgatcgtctatggattcatcttatccctgttatcaaagaacaacaactaagaatcaagaaattggaggagtcaaagaatgcaggataacaaacaaggattacaagctaatcctgaatatacaattcattatttatcacaggaaattatgaggttaacacaagaaaacgcgatgttaaaagcgtatatacaagaaaataaagaaaatcaacaatgtgctgaggaagagtaatctttagcactatttttatacaaaaatttaaggaggtcatttaattatggcaaaagaaattatcaacaatacagaaaggtttattttagtacaaatcgacaaagaaggtacagaacgtgtagtatatcaagatttcacaggaagttttacaacttctgaaatggttaaccatgctcaagattttaaatctgaagaaaacgctaagaaaattgcggagacgttaaatttgttatatcaattaactaacaaaaaacaacgtgtgaagtagttaaagaagtagttgaaagatcagatttatctccagaggtaacagttaacactgaaacagtatgaaaagctatgagttagatactcataatctttattcttttagaaagcgggtgtactgaattggggtggttcaaaaaacacgaacatgaatggcgcatcagaaggttagaagagaatgataaaacaatgctcagcacactcaacgaaattaaattaggtcaaaaaacccaagagcaagttaacattaaattagataaaaccttagatgctattcaaaaagaaagagaaatagatgaaaagaataagaaagaaaatgataagaacatacgtgatatgaaaatgtgggtgcttggtttagttgggacaatatttgggtcgctaattatagcattattgcgtatgcttatgggcatataagagaggtgaataaaatgtttaaactaatctttggttatagtttctggacatgtttttggttcggtaaatgtaaataagttttagtcagtgcttcggtactgactttttatttattgttgtaattatggtaatatgcagaagtgagcaagttggatagatggtggctatctgagtataaggaggtggtgcctatggtggcattactgaaatctttagaaaggagacgcctaatgattacaattagtaccatgttgcagtttggtttattccttattgcattgataggtctagtaatcaagcttattgaattaagcaataaaaaataaccatcgctaactttggctggtttcgatggttaaatggttattaatttaatctttaatctaaaatagccaccgtctttttaacgggctcattagggtaacatgtttgcgcatgttgccctttttctatatataaattaacacaccataatataaatatcaaatagacggcttattagtcgtctttttattttgggtaaaaggagataagaatatgattaattggaaaattagaatgaaacaaaaaatcattttgggttagcgatattgtcagctatctttttatttgctcaaaacatcgcaaaagctattgggtatgatatccaagtttatacagagcaattaacagacggtttaaacgctatattaggatttttagtattaactggtgtgattcaagacccgactactaaaggtataggtgatagccaccaagctttagaatatgaagaaccaagaagaaaatactaggaggtaaaataatgaaaacatacagtgaagcaagagcaaggttacgttggtatcaaggtagatatattgattttgacggttggtatggttaccaatgtgcagatttagcagttgattacatttattggttgttagaaattagaatgtggggaaatgcaaaagatgcaatcaataacgattttaaaaacatggcaacagtatatgaaaacacaccatcgtttgttccacaaataggtgatgtggctgtatttaccaaaggaatatataaacaatacggtcatattggtttagtgtttaatggtggtaatacaaaccaatttttaattttggaacagaactatgacggtaacgcaaatacgcctgcaaagttacgttgggataattattacggctgtactcactttattagacctaagtataaaagtgagggcttaatgaataagatcacaaataaagttaaaccacctgctcaaaaagcagtcggtaaatctgcaagtaaaataacagttggaagtaaagcgccttataaccttaaatggtcaaaaggtgcttattttaatgcgaaaatcgacggcttaggtgctacttcagccactagatacggtgataatcgtactaactatagattcgatgttggacaggctgtatacgcgcctggaacattaatatatgtgtttgaaattatagatggttggtgtcgcatttattggaacaatcataatgagtggatatggcatgagagattgattgtgaaagaagtgttttaattcttaggttaaaatgttaaatatttgttaattattttttaatgtaattttagtttcttttaatattttattgatttttaatattttctcaatataaaatgaagttgttgatatttatcatcttaaataagggtgttagctataaaaagagataaataaaaacaaatatattatatttggaggaagcgccatgctcaaaagaggtttattatttttaactgttttattgttattattctcattttcttcaattactaatgaggtaagtgcatcaagttcattcgacaaaggaaaatataaaaaaggcgatgacgcgagttattttgaaccaacaggcccgtatttgatggtaaatgtgactggagttgatggtaaaggaaatgaattgctatcccctcattatgtcgagtttcctattaaacctgggactacacttacaaaagaaaaaattgaatactatgtcgaatgggcattagatgcgacagcatataaagagtttagagtagttgaattagatccaagcgcaaagatcgaagtcacttattatgataagaataagaaaaaagaagaaacgaagtctttccctataacagaaaaaggttttgttgtcccagatttatcagagcatattaaaaaccctggattcaacttaattacaaaggttattatagaaaagaaataaaacaaaatagttgtttattatagaaagcaatgtcttgattgaatatgtgtagtgaaaattatctttcatcaaattctcattcatgcacgaatggttcttccccacctaatcagatattaggtgacttatggggagaaatcagttaggatgaaaaagtggataatccttttttaggcaggtacttcggtacttgcctatttttttatgttataatctttctagacgtattcaagggacgtctttttagattgtatgttatagctagctttcgggctagttttttgttatgatgtgttacacatgcatcaactatttacatctatccttgttcacccaagcatgtcactgggtgttttttcttatgatagagagcatagttttcatactactccctcgtagtatatatgactttagcattcccgtataatagtttacggggtgctttttatgttataattaactgtatatagtaggagtgaactatatagcctgttaagtggcctagtaacctaacacttatcctgcaattgatatcctttttgcccttcactcgatacatatatatcaacaacatagaaatattacagtcgctacaccgcatcttaaatggtgtggttatttttattggaagtgtgtatcaggtatcagtaatgttaaaacaccagctaaaaatgaaaagaattcaccagtgccagcaggttatacactcgataaaaacaatgtaccgtataaaaaagagactggttattacacagttgccaatgttaaaggtaataacgtgagggatggctattcaactaattcaagaattacaggtgtattacccaataacgcaactatcaaatatgacggcgcatattgcattaatggctatagatggattacttatattgctaatagtggacaacgtcgttatatagcgacaggagaggtagacaaggcaggtaatagaataagcagttttggtaagtttagtgcagtttgataattagatatataaaggtttggcaagttatgaaatgtctgccaaacctttatataaaaaagaaatatctaccttttaatttatgtaactactattagtatgcatattcattagtttttccaggaccattaattacataagatgatttagactctccttttttaaagaagtatgttttatacattttacctagtaactcaacattttttctatcttcagcaagtggtgtattcagatatactgtatagtaacctttattttcagttaaaataaccattttttcaaattgagcagaattttttgtgcctttctttaaataatttctcaaacgttcatctaattttcctagcgttgtaggaagaccactatttttaaatgattctttataagctttttctttctctaacattttcttatttgattctatttcttcatttgtaggaaacggttcaaaagtaaaagctttcgctgaatgatggtgtgtactgattcctgccgttaaaaaacttaatgctaaaactgttgttgctaatttctttttcataatgatgttaattctccttaaattctatatttaaatttatagttagttttgcgaaattcctaaaatgagtttaatctaatcgacgaaatatattaattaacttgaaattaataaaagattaattatttttaactaaaaattaaaattcaattagtgttttgatgaatttggtctcgataaattgaaataatctaaaaaacgctataatttttctattaatagtaattaatatgtgctatatttatcttagacacagcaatgtgttcaaattttcatctattcataagctagccttcgggctagtttttttgtgctatatatatttgttttaattaaataaaattagataatgcaatagtagccattttatgttaatattaccttgggcgttttcaaggagcgcctttcattttttatgtattgctccccttcgggctagtatattaaatttatttttgcgctttccaaatcaatgtatatgtgttatattgtttatgggaagtaggtaagcatttcggtgcttacctttttttgtttttctataaatacaataaggtatgtcaatttgataatttattaattttcatttaataagaagatctatatagttaatgaataattaatgtacttttttttagttagtcattaaaataaattagtactaattactaaggagaataaaaaatgaaaattagaaaatctatacttgcgggaactttagcaatcgttttagcatcaccactagtaactaatctagataaaaatgaggcacaagctagcacaagcttgccaacatcgaatgaatatcaaaacgaaaagttagctaatgaattaaaatcgttattagatgaactaaatgttaatgaattagctactggaagtttaaacacttattataagcgaactataaaaatttcaggtcaaaaagcaatgtatgctcttaagtcaaaagactttaagaaaatgtcagaagcaaaatatcaacttcaaaagatttataacgaaattgacgaagcactaaaaagtaaatattaaaaaaaccacccttttacgggtggttttaattttctagataatataaaagtgttcataaataaaacagtataggcaaacaataaagtattgaaaaaagtaagtttaatatgaaaattgttaaatgaacgacatcttttgtttttataaatatcaagaaaataatcaaactcaaaataaataacgtaactgtagtcataggcgtccatacataatcagcattagtcattaagaatggtgcagccattatgaaaaaatttataatgcagatgaaatagacaattagactataaattagataaataacaatacacacccttcataaataaataatttaaatcctatatattttaacaaaagtaacacacagaagtgtagaaaataaaaaatattggtaaataaaatcaataagtttaaccaatatgttgctcgcttcataccgtatattgcaacaaaaattccgattaagaaaaatatagcccctatgataaaacagaaatccgatgctgaattattaaaaaatgaggtgtttagagttagaaaatgagttaatgagttgactataactaataagatattaattatatttgtatggttcttcacatgatacctccaagtaaaaaaatctaattaataaagtgaatgcttgatgaacaagcagttattccaaacagaatcaataagaaaagtagaatcaacatgctaatgccccataaacaacccttttcactttctctattattaatttcttgacttcttttaaagatattattacttttacattctttagttgttttaaatttcacgtttttattacttccttttgtctaaaagtttacaatgaatttttgattataataatatattcaaaatagtactatctagtttgatatgtcaagcaatattattataaaattggaattctgagttgtctactctaatttattatatttacctataaaaatacacctcaaaaaatagatttttcagtctagcttttggggtgtacattccacacaaacatgtgattattttgatgtttctattaaacttgtaattttaaatttaaagtccctaaaaagtccctaaaattttattttatatgaggtattattgataatgataaagttataaaccttgatattatgctgttttactttttgaatgataagtaattttatgttaaaagtctccagtttggatacatagaaaccttgtaacaacagtatttattgggtttggagtccctaatgggtccctaaattacatactttctaaaattttagttgtttttttgtcctcttcattaaatttttcttctaacaaatgagaatacacggatgtagttattgctatatttttatgacctaatcttttagaaatgtaatgtatagatacaccttttgctagtaaataagaacaatgagtgtgtcttaatgcgtgcgatgtaataattggtatattattgactctacaggctgatttcaaagcattattgatagcctgaaggttaattatagatccggcttctttgaaaatgtaaccatcatagctaattgcaaatgtacttatgacgtccataatgtgtttcatatcagatttagcgatactgatatatctaggggaagtatcggtttttcgctcgtcaataaatatagtgtttttcacttggttgatatgctcaatctttatatttcttgcaccactgacacgacaacccgtacaaatcattatgaatagcgctaatgatgaacgagttctcttctttctgacgtgatcttttagtatttcatattcagttaccgagatgaatttttcttgttctgacttcgtaggttttccggctttataattaactttataagcgggatttttaaaaataagcccatcatataatgcgtcatctaaagctgaccgaatagcaccgtttgtttttcttatagtttcttttgcgtgttcttttgaataatcgtttatgaatttctgataaacttgtctatttatctttgataactccattttacctattttatgtttttgtatatgttgtaatgcatttctataatgacggtaggtattttctttaacaacaggttgtttatacgttttaatccaattttcgaagtattcttcaagagttatatagttatctatattaaaaccacttcttaactcatttaacttgtctagtccagcagaattagcttcacgctttgttctaaaacctttcttacggtatctttttccttcatacttaaattcatattgccattttttaccatcgtaacaacgtgttttcatgcgttccctcctcaaaattggcaaaaaataataagggtaggcgggctacccatgaaaattgtataaaaaaagacgcctgtataaaatacagacgccacttatagttataagattacatggttaattaccaaaaatggtaacgaatatatacgtgttttaaaggataaacctttaatatattaaaattatatcatcttatatcaggaatctgcaatatattattattaattctatttatcagtaacataatatccgaagaatctattactggatttttaattttttggggtaaaacttttcttatgcgaaacttactaatcggctggaaagaatttatgcaagcgtaactattaccttttaattttttttaccttatcaattgctgatactatgttattaatgtttctgtcaattttatttaatttattttcaatttctaaactatcagatataaattcactaaaataatctttagtgatgaattctgtgttgttttttggtattttttatcgaaacttcttttaatatagctgaattattttgcgcgctaattaaatttaaaaacaatcttaaataatactcccatttcaaatcaaaattcatctttaaatactttttgttttctttagaagataagggaataacatttactatatcttccgtattagaatcatttttattcatcactattgcaaagtgtgaattagagaattctttattaacgtttataccgaaatctacaaaaactatttctccttgtttaaactttggataaaaacctttatggtttttttcaccttcaaatctcttgagtaaatagtgaatatctgaatctaattttttaaattttggatttccagaagtttttaatttattaatgcgtttttctatattatgcgtcatcatttctcctttattctcgctcacactctcaccaccattcaacgtctacactagtaggtcgtttttttatttagtaaaatcataatgaatcttctttggttaacttatctccatcttattttttgtgaaataaattccaagtatttacgcgcattatgtgacgataaatctttaggtaactcataagtgaatggttgattaccactagttaaaacttcatatactatagtttctctttttattttgcaattagttattttcattataaacttcctttcaaacactgctgaaatagacgtcttttatattaaagcgccacacaggcgctgttaatcacaatttagttctatcagtgattttagactccataactctttgatgtgattctttagcttctcgaatcatatctttaaattcttgactgtctataaaagctttagcctcttctatttgctcttgagtaagctctttaccaccagtattgatgtgtaagtgttcaatttctttataagtactcattttttcgactcctgttcttcaagttcacttttagttataggtaaaccattgttcaatctataagtcagttcttcttctgtataaaaggggatttcaaccatttcccactcttcaatgttaatgtcaacttctttaaaatccatgttaaaccctcctgtgaaatgaattttctattatttatagtaattacttataaaaatacaatctttacctatctcaaactttgtattctaaatgtactcgtaatccatagtctgattctttagtaacgattttctcttctaaataatctaagttttatacttaccaccattaatatatgcgttacaagaaacgatgttgtccatatgattgactaatcttgaagcatactctctaggtacatatccaacgtgaaattcagagtattcatttgaaatcataacttttatcgcgttttcatcataaggattatccggttctttttgtaagaatacaccaggaataacctcgtaatcagaaatttcatacaccttgtcttcataaagtaattcttctttaagttcatttcctttcaaatcactatataagaaaaagaaatcgtcgttatttttcattttcttgataagtttctttaattcttttctacgaccttcataatttaatcctacgacgtcgaaaatttcaactttagtttgttcatcatcattaataggtagacaatcattcgagataattgtttccttattcttagataattgcatataagtttttaaaattgagatgaatcctgttaaaggagagtttgttacgaaataaactgttaattttctattatcgtttaatgttaaaaaagcttggtttttccaaatagtaacaacagtgttataatctatcacctctgataatgagattttgaatatataatcttcttctttccttataaaacaaatctcttcatgtgaaatgaatatagaacccattctcctcttgttttcgtcgaattttatgtcgcaactgtcgctgattattggttcaaagtaactgtattgatctgataatattttttcatcttgctttctaggtttcattttactacctcctataaaataacttttccaactaacctcacactttcgttatcataaaatataatctttatactttttatttaaagaaaccaacgttaatctattatcttctacataaactttctttacgtaagcatctccatttataataaagacgcctatttgtccatctttgatagtgtgagatttttcaatgaatataatttgtccgtttttaaataacggctccattgagtctccatttacttttaaagctatatcatgtgcggggacataacctcttacgaattcttttgaaataggctcgttatataatctttcgccaataccagctgacgcacaaccatatatatccacttcggatttttcttgaatgtaagaattgaaatctaccagattatcactgtcattattttgttcttctaattgattagtcgcatattttagtacattgctttgtcttggaggcgtgagtttactgtatatggaagtgatgtcgttattttcaatttttctattcttagaaatatcaaaccccataagccacgcttcgttaacgtttaaagcctttgctagttcaaagactttgtcttgtttcgcttcatattttccgtttaaataatcgctaattgagtttctaccaataccagtccttcttgatagctctgattgagatatcttccgttcagacataatttgctttaatctatccttaaaactgttcatatttctgaacacctcctaagaacataatactacgtacaatgacgattatcaataattttttaacaaatattgtacagaaaaatgtattttatgtgttgacttatttaaacaaaggtgttttaattgatttgtacagaaaaccgaacaagaagggaggtgagtttatgatatacaatttcgattatagtttgctgtacgaaagaatggcagagtatagatatagccaaagttctttagcgaacgcaatccctatttcaaggacatctattaatcacaagttgcaaggaaaaaatttatttacacaatgggaaataaaacgaatctgtgaattattagaaatcccaccaacaaaagtaggtagatatttttttgaacaaaatgtacagaaacctgtacaaatgtcgtaacaggaggaaactatggaacaaatcacattaaccaaagaagagttgaaagaaattatagcgaaagaagttagaaatgctataaaaggcgagaaaccaatcagctcaggtgcaatttcagtaaagtaagaatcaataatgacgatttagaagaaatcaataaaaaactacaatttcgcaaaagaatttgtcgctaggaagattgaggaagctcaatcatccgattccgctaaaaaaagtatcagcatggcttcgaatcaattcatcaaaaagcttatgtacaagatgttcatgaccatattagaaaattaacattatcaatttttggagtgacacttaattcagacttgagtgaaagtgaatacaacctagcagcaaaagtttatcgagaaatcaaaaactattatttatacatctatgaaaagagagtttcagaattaactatcgatgatttcgaataaaggaggaacaacaaatgttacaaaaatttagaattgcgaaagaaaaaaataaattaaaactcaaattactcaagcatgctagttactgtttagaaagaaacaacaaccctgaactgttgcgagcagttgcagagttgttgaaaaaggttagctaaattcaacggtaaggatttgccctgcctccacacttagagtttgagatccaacaaacacataagttttagtagggtctagaaaaaatgtttcgatttcctcttttgtaacagtttcaattccttcatatcctggaaaaacaattttctttaaatccgaaacatgtttttttgaaccatcctttaaagtaactagaagtttcatacttatcacctccttaggttgataacaacattatacacgaaaggagcataaacaatatgcaagcattaaaaacaaaatcgaacatcggcgaaatgttcaacatacaagaaaaagaaaatggagaaatcgcaataagtgcaagagagttatataaagctttggaagttaaaaagcgttttagcgcttgggcagaaattaacttgaagcatttcaaagaaaatagggattttacaagtgtacttacaagtacggttgttaataacggagctgtaagacaactagaagattatgctttaacacttgatgtagctaaacatgttgcgatgatgtcaggtacagaaaaaggttttgattttagagagtatttcatccaagtagagaaagcatggaacagtccagaaatgattatgcaacgtgctttaaaaattgctaacaacacaatcaatcaattagaaacaaagattgaacgtgataaaccaaaaattgtatttgcagatgcagtagctactactaagacatcaattttagttggagagttagcaaagatcattaaacaaaacggtataaacatcgggcaacgcagattgtttgagtggttacgtcaaaacggattccttattaaacgcaagggtgtggattataacatgcctacacagtattcaatggaacgtgagttattcgaaattaaagaaacatcaatcacacattcggacggtcacacatcaattagtaagacgccaaaagtaacaggcaaaggacaacaatactttgttaataagtttttaggagaaaacaaacaacttaataggaggaacgaacaatgcaagctcaaaacaaaaaagtcatctattactactatgacgaagaaggtaatagacgacccgttaatattcaatacaacgatggctacgacttaatgatagaccagcgttttattgaaatgacgcttgaaagacatccgcatttaaaaaataacttttatggattaatagatggaaaagaatttaagttagattaaatttttgtgttagataattaaaagctaatttgcttagcaatgttacggacatactagtggttttgtttgcgacttttttaacttctttccaagtgtgattgtctcggatattatctaaaaattcatgccctgaccaagttatatcgttaattgtataaccataaatatgtccatcttcccaaccgaatttaacactaacatactttgcttcttccagttttaataatgcatacattacagtttcaaaatcatattttccaaatacaacattatctttgaaattgtattcggtgagcggttcaccaatctttttattagtttcaatttctaacaaaagatgtctaacacaatcatgatctaatttcatacttatcactaccttaggttgataacaacattatacacgaaaggaaagatagaaatgccacatattttaaacgtaacagttccaatacctgaaacacacgtgcttatcacaaaagatgaatatgaagagttaatagcttactcattagaccctgtatggaacatgagcgacttaaagaagaaattaaaaattgcatctgatgaaacaatcaaagacaggttattatttcaccctagactcgaaaaagagttaagagcacaaggtatcgtacattatcctgatgagaattttaatcgttggaggtttaacgcaagaaggatgcataagtttgtagatgaacattttaatgagatttacaaaggagggcacaacaaatgagtaaaacttataaaagctacctagtagcagtactatgcttcacagtcttagcgattgtacttatgccgtttctatacttcactacagcatggtcaattgcaggattcgcaagtatcgcaacattcatattctataaggaatacttttatgaagaataaaaaaactgctacttgcgccaacaagtaacagtaacaaacatttaagaaataaaattcaagttaaatataaaacgaaaaacggaggaagtcaaccatgactaaaaattataaagacatgacgcaggaagaaataaaagacttattatctgaaaaaacggcagaattgtatgaattagcgaaagaaattaagggagaaagtaaatttgatattttgcttttctcatcaataggagttatcgacggagattatttagcaggttcaagttctgtgattggtcatacttttgatcttgcttacttattggatagcactaagagttataaagatattgtcaatgttctccaaatgtgtaaatcacaaaaaattctcggtatagatgacgacaaggaggactaaaacaatgtattacaaaacgggtgacgtatgtcgaaaaatatttaatgtagatggctttgattttcaattaagagttaagaagcgagcatatagtgtcgaaatagtcgttttagatcatgaaggaaattcaattgacgggctactagtttctgacgagaacgatctatacacagctttagatattttgaaacaaagtatttatgaatggattgaaaataacacagatgaacaggacagactaattaacttagtcatgaaatggtaggtataagcatgagagatacagaaagaaatatattgaatatttttaagacgttattcgacgaatatactttgtcaaaccaacgagcattattggaaattgaacgtaatcatcacggatacttatcgattaatttcttgcactatcacgacagttacaaaacaaacaataagcttgtgcagatacatgaaatcaatccagacagccatgaacgaataaaaaatttaattatcgaggtgctaagaggtcatcggaagattaaaaaaggagcatgaggaaagatatgaaaataaataagttaactatatcgaactttgctggaatcaaagaagaaaaatttaactttgacggtaaagatgcaaaaatatacggcaataatgcgactggcaagactacaacagcaaccgcattacaatggctgcttttcgataagggtttagacggttcaaccaaatcatttaaccctgtacctttaaacgaaaaaaacgaagaaaattatgagttaattccgactgttttcgcagaatttgaaatcgacggaaaaattacgacttttaaaaaagagtcacatcctaagtacacaataaatcaaaaaacgaatcgcaaggaatactcacgaagtcgaacgaagaaacaatatatcaatgatgaatcaataaaagtaaaggattataaagctcgtattgatgaactgattgatgaagatgtattcaagttaattacgaaccctcaagcatttaacttactagattggaagaaacgaagaagtttgttgtttgaaatcgctaaaccaatcaatgatgaggatgtcattaaaacaaatgatgattttaaagaactaaataatattcttggagatcacgaaattgaaacaaagaaaaagattcttacagacaagataaaacagattaacaaagatatcaaagatattccgatacgtattaaccaaacgcaacaaaataagcaggatgtaccggaattcgataatgatagacacacaatcataaaacaagaaattgagcaacttgaaaatgagcgtatagatattcaaaacggtgcagaagaaattaatttgcgtaaccaattagctgataaacaatcagaattgaagcgcatagaagctaataatagcgccagtaatgagaacaaaatacatgctttaacaaatgagctacacgttgaaaatggaacggttgcgaatcttaaaacaagattaaagcaaaacaaacaacaaattacacatgaagaaaatcgacgtaatcaattattagaaaatcataaaggattaaaaagtgatttagaaaaagctaaaaatcaaaaatttgaatatcttgatgacaatgtatgtagttgttgtggtcaacagttaccagctgaacaagtgagtgaggtaagagaaaaagcattgcagaaattcaatgcaaacaaatcgaaagaattagaaacaatacaaacatctatcaatcacattatttcagagggcaagaaaataaagccaattatcgagaaattagaggatgacaacaataatttacaaattaaaatcaacgaagcagaagagcgttcagcaagaatacaaaacaaaattaataagttgaaaataactcacgttgacgttacgcaaactgacgaatacaaagcagtaatgttagagataaatgagattaatcaaaaacgctctaacatcaggaaaactattcaagataaagtttcaggaatagatgacaaaataagcgaacttactcaagaaaaatcagaaattgaagtgtcaatatcaatcgaaaaatcaaataaacatctagatgatgttatttctgaattaagaaatgaagaagacagattattggatgaaaaagaaaagtattcacatgacctttatatcttaaaagaatttacaacaacaaaagtcaaaatgcttactgaaaacatcaataacgaatttgatattgctgaatttaagctattcaataccttagttaacggcgaattagaagaaacatgttcaacaacggttaatggtgtcgagtatgacagcggtttaaataacgcctcaagaattaatgttggcttagatatcatcaacacactatcaaaacattttaaagttacagcgccaatatttattgataatgctgaatcagtaacagagcttatcaaaacagaatcacaacaaattcaattgatagtaaatgaacaagataaaaaattaagaatggagactatataaaatgacgaatgaattactattaaaaaacaataaaataggcggacaacgttctatctagagttaagacattagaagcacaaggagatttacagtttcctgcaaactattcgcctgagaatgcaatgaagtcagcaatgttacaactgcaagaattaaaaggatctaaaaaagatggttataaaccagcgctggaatttgcaacttcaaccagcatagcaaacgccttaatggacatggttgtacaaggtttaaatcctgctaagaatcaaggctatttcattatgtatggcgataaggttcaattccaaagaagttaccacggaacaatggcagtaactaaacgtgtagcaggcgcagaagaaattaatgcagaagtcatatttgaaggtgacgaagttaagtataaaactaaaaacggaaaaattgttgaacttgaacatacacagtcttttggtaacagaaacacacaaaacattatcggtgcatatgcaacagttgtatttaaagatgaaagtagaaattacactgaaatcatgacatttgaagagattgaagaagcgtggaagcaatcacaaatggtttataacggtgtatttaaagaagacggtacacacagaagattccctcaagaaatggctaaaaagactgtaataaaccgtgcatgtaaaaagattttaaacagcacggatgacgctagtcttttatcaaatcaaattaaagaatctgaacaacgtcaacgcaaagaagtattggatgcagaagttgaagaaaatgcaaatcaagaacaattggattttgaaccaccagtttttgaagaagcacaatacacagaattagaaaatgaaaaacctattgatgtatctgactttgaagaaataaaagaacctgcaacagaaaaagaaagcgaagaagagccattttaattgaaacaatagcaactggttcaagtggtaactgctacgtcttaaatgatggacgtactacgttactgcttgaggcaggaataaaatttgaacgtgttcaaaagcatttcaaatataaaacaagacatatagcagggtgtcttatcacacacgaacatggtgatcatgcaaagtacacaaagcagtttgtcgacaatggtgtaatcagctatatgactgctggaacacaacgagctatggattttgaaagtcatcgcttatgcacgattaaggcaaagcaagagctacgaattggtacgtggtcaattttaccatttgacattgaacatgatgctaacgagcctgtggctttcttattacaaagcacattaggttataaggtcctgtatgttactgatacgaagtatctgaaatacaaatttaacggcattacgcacatgatgttagaagttaattatatctatgaacaaatgcaagaaaacataaaaaacggcagtgtacacagcgcattagcaaacagaattatggagtctcattttagcttagaacatgctatcggaatgttgaaagcaaatgatttaactagactcgaagaaatacatttaattcatttaagtagtcaaaattcaaatgcaaaatacattaaaagtgaaatacaaaaagtgacgggcgcgcccgtttatgttggaggtttataaatgctaaacagaacaatattagttggtcgtttaactagagacccagaattaagaaccactcaaagtggtgtaaatgtagcatcattcacattagcagttaaccgcacatttacgaatgcacaaggagagcgcgaggcagactttattaatatcatcgtatttaaaaaacaagcagagaacgttaataaatacctatctaaaggatcgttggcgggcgtagatggtaggttacaaacgcggaactatgaaaataaggaaggtcaacgtgtatacgttacggaagttattgctgatagtattcaatttttagaaccgaaaaactcaaatgacactcaacaagatttatatcaacaacaagtacaacaaacacgtggacaatcgcaatattcaaataacaaaccagtaaaagataatccgtttgcgaatgcaaatggtccgattgaaatagatgacaatgatttaccattctaatttaaccggtttgaaagtgaggtgtgtatatgactggttggataagtattgatcgctcaattcaaaatcattggctatttaaagaaaagagaacattttcaaagtttgaagcatggatatatttactcatggaagcgaatcattcaaaggcaaaagtgcctattggaaaccaaattgtaaccgtagaaagaggacaaagattaacatcgattttgaccttgtctgacctttttaactggtcacgatttaaagtgaaaaccttccttgacttactcgagagtgatggaatgttagaagtcaaaacaacatcaaaatatacccttataaccattgtcaattatgacttttatcaaagtgagcagggcaggaaccaacatcaaaacgacatcaaaccaacatcaaaacaacatcagtcaaacatcaacccaacatcaaaacaacatcaaaccaacacaaacaataatgataataaagataataatgaaaagaatgtgaataatgagaagaagaagacaaccgccttcgacttcttccaagataacggattcggtttcataacttcttacaatttagacgatttaaattattatcttgattcatttgaaaatgattcagatgaaatagttaccgcatcacttaaaatcgctaaagacagaaacaaagttacttggggatatgctaaaagcattttgaatacatggcttaatgcaaacttgaaatctattgaacaagtacgtgcatttgaaaagcaacaacttgaaagcaaaaaacaaaattataaacctttcgttaaacaatcaaaagaaaaaacaacccaaatggctcacagacagcacgagagaaacgaaaacgccggaagtagatgaaaaccttgagaaagacagagaagcttttattaagcgtctaaatagcaaatgggagtgattgaaaatggatgcatttgataaatactatctatttgatcatgacggcaacaaaatgttttcagttacaccacattttaaagatggtcggcatttagttgttggaataaaagaaacaaaatttaatggtcgtcgttggtatttagacgattatgaattaaatacacttattgataatgaacaaatggagttaggacaccaaacaagcttatttgaatatatatgagggattacatggagatagaaattaaatttaatgaagtgtttaatgcgccgatggggtcgcctcgtccacgctttcgtaatacaggtagatttgttcaaacttacatgccaacgtcttacacaaagcataaagcgtatatacaagggcaaatgcctaagttaaatctagagcgcgcactaaaaatcgaattagacttttactttccattgcttaaatcatggtcgaagaaaaagaaaagcgaaatggttgggcagtataaagtgactaagccggatatcgacaacttaattaaaacggtattagatgcttgtaatggccatgtatggaaagacgataaccaaattacagaaataactagctcaaagcgttatggaattgagcccaaaataatcatacgaatagaagaaatataagaggtggataaaatggcgagaaaagcaaggattgtaacaataaatgataaaccttataggttcagtaaatttgaaatggaattaatagaaagtcacggtataaccgctggaatggtttctaagagagtaaaagacggttgggaactacatgaagcaatggacgcaccagaaggtacgcgtttaagcgagtacagagaaaagaaaacaatagaaagactggaacaagctagactcgaacgcaaattggaaagaaagcgaaagagagaggctgagctaagaagaaagaagccacacttgtttaatgtacctcagaaacattcacgtgatccgtactggtttgataatacttataaccaaatgttcaagaaatggagtgaagcataatgagtgtaatcagtaacagaaaagtagatatgaatgaaatacaagacaatgttaagcaaccagcgcactacacatacggcgacattgaaattatagattttatcgaacaggttacggcgcagtatccaccacaattagcatttgcaataggtaatgcaatcaaatatctatctagagcaccgttgaaaaacggacacgaggatttagcaaaggcgaagttttatgtccaaagagcttttgacttgtgggagcaatgactatgacatataacgcgcgcaaagaatacttaaaccaatttttcggatctaagagatatctgtatcaggataacgaacgagtggcacatatccatgtagtgaatggcacttattactttcacggcatatcgtgccaggttggcaaagcgttaaaaagacatttgatactgctgaagagctcgaaatatatataaagcaacatggtttggaatacgaggaacagaagcaactaactttattttagaggagatggaaatgatgaataatcgtgaacaaattgaacaatccgttataagtgctagtgcgtataacggcaatgacacagagggattgctaaaagagattgaggacgtgtataagaaagcgcgagcatttgatgaaatacttgatggaatgacaaatgctattcaacattcagttaaagaaggtattgaacttgatgaagcagtaggaattatggcaggtcaagttatctataaatatgaggaggaacaaggaaaatgactaacacattaacaattgatcagttacaagagttattacaaatacaaaagaagttcgacgatagaataccgactagaaatttaaatgacacagtagctagtatgattattgaatttgcggagtgggttaacacacttgagttttttaaaaattggaagaaacaaccaggtaagccattagatacacaattagatgagattgctgattacttagctttcagtttgcaattaactttgactattgttgatgaagaagatttggaagaaactactgaggttatggttgatttgattagaaaatgaagttactttacctaaactacattcagtttatttttgttcatgtaatgcatacactaacagaacaatttgtaaaaggtattgataatagtattgtacaagttttaataatgccttttttgtacgccaatacttactatacaatcgaccaactcattgacgcatacaaaaagaaaatgaaaaggaaccacgaaagacaagatggaacagcagacgcaggaaaaggatacgtgtaaagacatcttggatcgagtcaaggaggttttggggaagtgagcgacatgttagaaatatttttaatagggtttggcgtttatctcttttatcgcatagcaattatttttcttaagagtaaaaagactatacacacaaacatatatgaaatgttaatgcttgctactatctttatgatatctacaattgcttataaacatcaaaagacgcatatcttaatagcatttttagtaatgttttttatgagtaagctcaaacaagttcaagggagctatgaggaatgacacaatacttagtcacaacattcaaagattcaacaggacaaccacatgaacattttactactgctagagataatcagacgtttacagttgttgaggcagagagtaaagaagaagctgagcgcaaatacgaggcacaagttaaaagaggtgcagttattaaattagggcagttgtttgaaaatataagggagtgtgggaaatgattaagcaaatactaagattattattcttactagcaatgtacgagttaggtaagtatgtaactgagcaagtatatattatgatgacagctaatgatgatgtagaggcgccgagtgattacgtctttcgagcggaggtaagtgagtgatgtggattactatgactattgtatttgctatattgctattagtttgtatcagtattaatagtgatcatgcaagagagatacaagcactcagatatatgaatgattatctacttgatgaagtagttaaaactaaaggatacaacgggttagaagaatacaggattgaattgaagcgaataaataacgatattaaaaagtaatttatattatcggaggtattgcattgaatgataaagattgagaaacacgatatcaaaaagcttgaagaatacattcagcacatcgataactatcgaagagagttgaagatgcgagaatatgaattacttgaaagtcatgaaccagataatgcgggagctggcaaaagtaatttgccgggtaatccgattgaacgatgtgcaataaagaagtttagtgataacaggtacaatacattaagaaatatagttaacggtgtagatagattgatagatgaaagtgatgaggatacgcttgagttattaaggtttagatattgggattgtcctattggttgttatgaatgggaagatatagcacattactttggtacaagtaagacaagtatattacgtagaaggaatgcactgatcgataagttagcaaagtatattggttatgtgtagcggacttttaccctatgtaagtccgcattaaaacagtttattatgttagtatcagattaatatttaaggttattaaatgctaatacgacgcatgaacaagaggcgcattactatgtgatgtgtctttttatttatgaggtatgaacatgttcaaactaattgtaaatacattactacacatcaagtatagatgcgtcttgatactacttaagttatataaggtgaaacattattatgactaaagacgaacgtatacgattctataagtctaaagaatggcaaacaacaagaaaaagagtactagaaagagataattatgaatgtca

SEQ ID NO: 8 - protein, 68 aa, Phage F168/08
WTSFFHNIVGYDEPLSKEVLTAYHLKEITDLNELPEHHKKVFETLSAIEYSTVEQALKTFKTNYVEGI

SEQ ID NO: 9 - protein, 90 aa, Phage F168/08
MEFLKYPSLVNHYAIGKSKRLVNRFDNILWYASEKIHGANASYALSATGEEYFAKRSGIISKDDKQFSMLPECVTSDIREGTKKAFRILS

SEQ ID NO: 10 - protein, 258 aa, Phage F168/08
MEPTLLMPYQQLGKSISQSVVELFLKTINNFQCFQNVLPQTFEKVPKKLFEYYPKAESIHVFGEFFGKGVQVMDYDLVKEGKKAFRVFDVIAKYDDGSMAVCGINTWKHLFEQDSIVPYYTLGKTLKEFLETPPSEESALGGYSEGVVLKPLQGYPINSTQDFLGVKYKTEKYLEVRHKPSEQRKKPPKLNNEQVEALNELGKYITKQRVLNVCSHGDFELIQNNIGKIMLAVKQDAANEFIKEVGSSFTEKRACRSL

SEQ ID NO: 11 - protein, 101 aa, Phage F168/08
MDFNTLIEQVQEWSANKGLDKAAPEKQFLKVIEEVGEVAAAMARNDREELVDGLGDTFVTLIILCQQLGVVPHEALDTAYGVISKRTGKMVDGVFVKSEDL

SEQ ID NO: 12 - protein, 107 aa, Phage F168/08
MMKLIELDNGRKQVFYNNVLMQYERRGSDVYGNPLYRVYPINFSFKRLKSVYRNYEKGGWEESYYLIQSYNILADMQNIASEVNAKNTFPEFDQTLLKDYREVSAYV

SEQ ID NO: 13 - protein, 83 aa, Phage F168/08
MALTMFEKESLQKENARLKRELATLKASQKLGGGLNEKELQKALNSCQRIFKTLNRGKRSLVLSKSAMVASVEYSGSGRSKNL

SEQ ID NO: 14 - protein, 52 aa, Phage F168/08
VVAQKTYKDCSKTAIREAEKSAWEIMSLENDFRNIHHFLKHGTMKAEDKDNA

SEQ ID NO: 15 - protein, 22 aa, Phage F168/08
MLNIIVTVISTAAVFKGARNGE

SEQ ID NO: 16 - protein, 97 aa, Phage F168/08
MVNKKLSDRLTKSIKFSRKKAKKRFIIARVTEEQAYTLRLLKAISKEDEAVCKATNKALLEYGYEEAGGHSYEKAREKFSSLPDVKKWHTNRRTRKR

SEQ ID NO: 17 - protein, 77 aa, Phage F168/08
MTKNHYKLYVDMKEGTHDYVSATVYSMFDEKVLWLPDIKKPENVADYTDEWKNGLYSYYEKLAISELNDYNATFSHL

SEQ ID NO: 18 - protein, 152 aa, Phage F168/08
MTEFANMNKEEVLELLNDWFGVSDYVTVMAELEKMKQVTFTGSTDIPLLGGNNDLIGLPQFFKGNEVEPEFPTYEELLEELEKDTWNLEAEDNTYNYSGFLERDMDFKTIHAENSDTTIAFFAIHTGGRHKSGLLKSNPIYFLKLTTIFKSS

SEQ ID NO: 19 - protein, 92 aa, Phage F168/08
LFFETYYDFQEFLGNYFYGQGYYAFKHDNKEYTISLDISATSEYVRIYISDENNEELQQSYEQETFMDLDREGVEAYLKDEGIEFTDLKHAL

SEQ ID NO: 20 - protein, 48 aa, Phage F168/08
MENNKAYERLLKEVELLQNDLMDIEDYSEEVYQAFQKVIDELEYIQAS

SEQ ID NO: 21 - protein, 52 aa, Phage F168/08
MTKQFKNIIATLTILVIALAAASGIATIKAVENANDKAILAERVEALEKTFR

SEQ ID NO: 22 - protein, 62 aa, Phage F168/08
MIKLSLPNVWKLWKKLSDKQEYDIAVKSNVIGAYLINHEEEAQKEYTEAYKAHKPTLLKKLP

SEQ ID NO: 23 - protein, 65 aa, Phage F168/08
VRGFSEGYLKGVSGRNLKANLERQVESFVVDLFFIKGNEKPLRNAVAAGLWERWLERLSDSFQID

SEQ ID NO: 24 - protein, 59 aa, Phage F168/08
MVPNPSYNLINACVNTPLERGKASRAADKRRPLYLWNLFLKGSKEEPSGKVALKLSDVY

SEQ ID NO: 25 - protein, 42 aa, Phage F168/08
LTWPLFLWYTIRNDKKGVLKAMLERIKGMLRKIRLANGLATA

SEQ ID NO: 26 - protein, 64 aa, Phage F168/08
MVAGIQKISLSKGKPVKGVNIKTGEEITFQTVSEVISYGFDKSHVASCARGESKTHKGFIWKYV

SEQ ID NO: 27 - protein, 120 aa, Phage F168/08
MVEWRDIEGYEGLYMVSDQGDIFNCSRNSLMKLRKDRKGYLLVGLTKKGNQKTYRVHRIVANAFINNIFKKPQINHLNEVKHDNRVDNLEWVTNKENSNYGSRNTKNKFKQRKACKRSKY

SEQ ID NO: 28 - protein, 69 aa, Phage F168/08
MNWKAFRLVSLYYLLALVIAFGLIVVITLVFGASVTIAIGRILGNLIILKVIWDMLHKEYEEAKEDLEK

SEQ ID NO: 29 - protein, 76 aa, Phage F168/08
LSEKLTKRIILAAVIIAYLITVGIIFGILWLVSLITGWEQLFFYLGVLFLIDLLWETTKYAFIRYNKDKHKTLEEL

SEQ ID NO: 30 - protein, 232 aa, Phage F168/08
MLFKKDENKLIKELKQEIELLTGRKAVYQLALDRLEMANEELQKEVDFLKIREAGFEERLKVASEKEVEAIEMANESAEESLLRQEAYDRLGKKFEEVCQKLTVEEEQNKRWEQEMGRLQEEYNGLKREYRELQKAIPSKPQLTATIKVDTKEIQEMLDNALQEIKEGYSPRLQEEPEYTYWIKSEGSSEKHFVSDSPQQLLRKANVFYMPYKAGILTLSESLIEMVTRKKA

SEQ ID NO: 31 - protein, 167 aa, Phage F168/08
LEGEWKVVNGFSNYSITKTGKVVNNLTGKILKPFINDRGYAEIGLGDGNIKRLHRVLLSTYNPIEGWEELTVNHMDGNKLNNNLDNLEWLTHEDNLKHYYDNNKRILVFDDATGEVLEEVTRMEKASTKYGVPKGVIQELCDLYHEGIYAHENGYGFCRMEDFGLDG

SEQ ID NO: 32 - protein, 37 aa, Phage F168/08
VLKNKVYAGHVWSYTGREFEKGSPLASKKPIKKVFGG

SEQ ID NO: 33 - protein, 55 aa, Phage F168/08
MLIEEDLGGFLVKLIKEVKSVDVETGLETVYRSAYAASKDLGKYSTSVRNACAKK

SEQ ID NO: 34 - protein, 71 aa, Phage F168/08
MKLIDATVVLNYIEKTKNELNTTSPANNSKFGKGWDAGFIRGIESIKGLVKDIIIEDEIPLANPSDMIPKK

SEQ ID NO: 35 - protein, 107 aa, Phage F168/08
LEYPEDDYDEGYQDAVETCMDEIKAALSVAKEEDSPEPIKLAVDGNIVAESFTGSSVTPINTLPNNYTKDVLEALLEASEDFYDASEIQALLKGAIQAIPKGKGVIL

SEQ ID NO: 36 - protein, 88 aa, Phage F168/08
MGMNRIKVYTKDACAACKMTKRVLTEAGVSFDEVFVDVRNDTETVEMLRLVGFRSFPVVMLDEDFDTAISGFHPPRLKVFIETVKEEA

SEQ ID NO: 37 - protein, 69 aa, Phage F168/08
VLYGKKEDLNEEIYSLEREIEDLEGQVYDLENELGSSEETVEELTEEVDTLSERVEELEEIIESMEEWE

SEQ ID NO: 38 - protein, 73 aa, Phage F168/08
MSKLPFEKELKEACSKPTLTQRETALIELVGKLQNALVDSNWDKLIAEQELEYAEERLTSVVWEKRRLERGDL

SEQ ID NO: 39 - protein, 17 aa, Phage F168/08
MQEITVEEFKQEEIGEF

SEQ ID NO: 40 - protein, 91 aa, Phage F168/08
MEGIELDNYYNFLEIGYLEGDQANVETTVYNLTGMLSAKVSDVTESEFEAAVEEVTEAIDNLTNSLEVLSELFTEAKQYLAKEDKKWEDNV

SEQ ID NO: 41 - protein, 103 aa, Phage F168/08
MRAIKMYSIKSYQQYLEKLGTVRKAAADFELNNSFSKKAHELIANQYAEDIEKLSQKVQEYHELIENIVSDEAEEDEKQLMEYLGTIRKQQKITEELESGGKE

SEQ ID NO: 42 - protein, 255 aa, Phage F168/08
MVRIGNRELEERQRKYLTTSKEPDEYEGVDLTTLKPKMKRFARHYMQTMNIAESCRSVGYNESSGYRVLKREDVKAYLQWLVSENADAAIMSPTQVLEELTNIALRNSSDYTVTVKGDVVEKPIDTSVQLSALNSLAKFHDLLAPDVKVEQSLNIVVDIADDVPNEAEEVEEEEFVEGDFTEVEEEDSDVSYDFLSGFLRKEIPMPFEESNLEVIVNDLIKDVNTHANQIASIQSDLNRMTTDISSVRDLLIKKH

SEQ ID NO: 43 - protein, 58 aa, Phage F168/08
MLKLLTEERRRQTESYLADEASDRKNKEFSQKQMWAVATALVTGVGSALVTIVKLIMS

SEQ ID NO: 44 - protein, 82 aa, Phage F168/08
MDVVISIAVVLGGVTTGLVNLVKSMDVVSPKYLPLVSLAIGMVFGLAMSPLLGITLYVGAISGLVAGLSAMGFYELTKTPAE

SEQ ID NO: 45 - protein, 253 aa, Phage F168/08
MKPIYHTCTTSLKDNIEQWYFYGGAGSGKSKFVVQNAILKGLSERRKFLVLRKVDNTIRDSIFQEFLVCLEEWNLLDFCEVKASYMTIKLPNKTEYIFKGLEDPERIKSIQGLTDIIMEEATEFTREDYDQLQTRLRHPTARHQQVFVMYNPASKDNWVYQYFHNPATKRPKGSKVICTTYKDNRFLPKAYLDHLQDLKNTNPVYYEIYALGKFASLGKRIYTNWKIDSEFKPNQLVKQGYEPRFGLDFGLSM

SEQ ID NO: 46 - protein, 129 aa, Phage F168/08
MIAPEIFDVIKRKKLTNQLIYADSANLETIEQIKRLGARKIKPVKKGRNTVLHGIQYLQGYTIYVHPRCVHTIKELENYEWKPAKGSDDYENKPKQNGFDHCMDALRYAVNDLIPRNRIRTINKSVLGL

SEQ ID NO: 47 - protein, 511 aa, Phage F168/08
MAIPNGQINAGDIITTNIRRKHFIRRNYDIRELVTLAEMHSRSSSAYGVLYDYYKGNHIAIQSRTFDDTNKPNSKIVHNFPKLLVDTSTAYLAGEPITESGDEKTIKAMQPVMKENYVTDVNSEEIKLSGIFGHCFEIHWIDRNNKHRFKAVSPMNCLIAYSADLDEEPLAAIYYNTVISDITGHVIRTYEIYTEDKILKFSTDDERDVYKEIPEVLDIRGYEEHPNLLKKFPVLEIIANEERLGDFEAQLSLIDAYNLAVSDSVNDIAYWNDAYLWLQGFDLSADSDSISNMKNDRVIVTDDTGNVKFITKDVNDKHIENIKNRAKLDIFSLSQTPDLVSKDFTAASGQALKAATQPLENKSAVKESKFRKVLAKRYELICSYLELMSKEKDLKPNEVTPVFVRNLPQSYAELADMAVKLRDMLPDETIINQFPWITDARLEVEKADEQRQKRADIALQNFKQTSAVQGASTAAANKLDKNPANTSTITTTDPVAAKEQEKAIQKKPKTD

SEQ ID NO: 48 - protein, 251 aa, Phage F168/08
MARKKDKEKRQQEIEDALVALMTAQNHKYHRFTDRFTVLLDGFVNELIVNLADPKLDAFAILQVSQYEAIRKLQAALIDYQEEFREMLLESMSDTLEETLGQLFPNKAIPSATDNAYIEQVIAEAYDYFEEIFLQLLVEIEAIAVGTIPSTEDIVTTIQKLRDRLSYTLRRHIEAQMSAVINLAVIEASKQYEIELWKWCIRPELTESGTCADCRELAEGGIGNEGLYTLATMPLLPRHPHCVCILIPYVL

SEQ ID NO: 49 - protein, 111 aa, Phage F168/08
MNPEEQGQGQQVDLTPEVIVGAIESNPELAQAIQPHVLTKDAVSSFLKTDEGLGVVAPMIDQSVSKGINAWKEKNLENIVQERLAELNPAETPEQKQLKQMQAQMAAIQKR

SEQ ID NO: 50 - protein, 109 aa, Phage F168/08
MLEMRGVAQEALAKAGLPASLAGYVLSDNPEAVKHKVSELDIEIQNIVSGLVDQKVAGIAAKAAPTNSDDMSSIGGSKTVERLTDLTVEEATELARTNPAKYRQLVQRG

SEQ ID NO: 51 - protein, 87 aa, Phage F168/08
MAHEVTKIADLINPEVIGAFLHQKMLDNLVLAPFAEIDRTLQGRPGDTLTLPQWNFIGLAEDLAEGEELQSVKLTAEDRKATVKKGC

SEQ ID NO: 52 - protein, 155 aa, Phage F168/08
MAIAGKIDNDLFAAMRALTPSDVEITDSYEWVLDAQVAFGEEFDEETYLFISPKRRATILKSKDFVHIQQGVSVIKGHLGEIYGMNIVVSNKIGENEAFVLKRGALTLLMKRDYMVEEVREGMKRQTNITADQHYVAFVKDAKRAIFINKVAAGK

SEQ ID NO: 53 - protein, 145 aa, Phage F168/08
MAKTYNIYQDEVKVQEGVAELTKTITGLTPNTSYKFEVTAVEEGVESAKSTAVTAKTNPRKVATVTASQKTMSLASDGSKALTFTVAPEDATNKELEITNSNPEFATYADGTVTAVVAGTTTITATAKDGSGATANCVVTVQAPA

SEQ ID NO: 54 - protein, 134 aa, Phage F168/08
MELIENTELFKSFEDVTLPPETEAIDITDLKLMLGYGNSTIRDNVLKVLKKRARQHICLFINKEVTDFPMELDYIADELTASRMSQLNSEGLKTESTDITRYDYKDDIYANWYGILNRWLEQQGEYRNKAFFML

SEQ ID NO: 55 - protein, 125 aa, Phage F168/08
MRYNDIVDLIQFNDWEDPDDDYGTISYKTRGTIVVKDLPVSVGSLRVQGKLLQNQDQQWEKRYLIQHKVFELKNLRVDAVRRHSTGEILNVYWDNTTGTDQTVSYKVEYRDIRRDKEDGVIWQGS

SEQ ID NO: 56 - protein, 126 aa, Phage F168/08
MAGFLEITKRIDFAGLEREFVNEVKGVVEKNSAQMATAVRLNIVRRGNIDTGTYYDGIKSKTEVEGKGKSVTGIVESDVSGNPYGHRGYAVYLEEGTYRHQAFPNFTDALEEYSDILVEQLSRIKV

SEQ ID NO: 57 - protein, 143 aa, Phage F168/08
MSNRPPFRARSSSVALQRAIVKEIRAQGINVWDGTNKFPEYPFIKIGEELTSGRTISKDAIGKMHNLTLHIWSDYDSSFEVKSLTDFLVDLLINSPLNLEDGFCIGEKSLDHVRYTEAANGTYKNERAYLFLDFEVIDSTIEP

SEQ ID NO: 58 - protein, 229 aa, Phage F168/08
MEACKSSYIRGTAVLIEVQNDLGEWIKVAAQRGGTLNRTAATLDVSNKEGFGWDDAEAGNKSWSIDCDGLFVEDNAGFQALNAAWVNGDCVRVRVKFPSGLTYVGQAILTDFPYEFGYEDAVTYSLTFQGKGALEEQQVAPTILPKKVEFTNETKEVKVGETLQATIKFTPENVSDQSVTYTALTPALATIDESGLITGVKEGTASFNVRSNVNTAVSALIDIEVKPAG

SEQ ID NO: 59 - protein, 121 aa, Phage F168/08
MIIRFQGKDLNLRLTYKSIHFLELAFDQDYASFIAEQTPFNQSLYIFWAMLQNESDYEGVSVLDVAELLQDSLDSYEFTLEEYFEKVNSSYASSILVKQLFKKQHWLVTQRRRKTRTSFRS

SEQ ID NO: 60 - protein, 98 aa, Phage F168/08
MVLCSDLGIPSSDFWTSTPYEFNGMLRGAYQRQSREASLFLSLVQSKKPVKLEKYQGFELVNETNKPKTTRDMAETMDELDRAAFKEEELSNLFDYFD

SEQ ID NO: 61 - protein, 544 aa, Phage F168/08
MADKEMRIKVRVDNSDYASKMKDMEGTQSRLGKSTEQTTGIFGKFFNKLNGGASLANSSMLGLGKSFLSTSVGFGTLTAAATPMAAAVMGAAEATKVAGRFAMDSIKDYANFEGTLKQVQIIAGGTQADMDMLGDTAIEIGGKTSKGAQEVAEAMVDFAKLGFTAKETSEAMKGIVYAAEASGSGVQETAGIVATALNVWNLKATEAEHVADVLAKTANETAADMQDMGYVLQYAGSSASLAGASLEDLSAMAGIMADNGIKGSKAGTSLRTAFTNLINPTDGAAAAMESLGVQFKDAEGKARPTMDVIYDLQDAVKGMDDIQIQELSTILFGKPGAAGMSFVLKSTKEQVQDLSKALVDSTGTAAKQAAAMRETMAGQLDQLGDSVDAIKLKIGRAFTDMFALDAVKGFNKALDGVDEGLSNFGKGFKRTSDLLETSNGLISGTKDANKFVEAVRDAGTNLTNIPFQESLAQSQVWGIGISKRAYETNEVMYQLNKSIQEFSFLPDDWEGKWGQASTILKDSVGQMELKLASAAAKGKHGGRS

SEQ ID NO: 62 - protein, 428 aa, Phage F168/08
MGGEADISGIMNQTIQENLPALQTALDEQVAVFGTANQSRLDALQTFFTNEKTLTDEQKSIMIQGELTHGQQLSDTIQTNNNKILELYQSMGQQDYAQRQETGAAINALQQQNSEILQNIATTESSSIVETLRAQASSTGTITQQMANDSIAAANQQYSETVAAASKQYVETVSSINHMSDESIAAAGTTRDELIEKARQQMVGTVDHAKTQKEQTVGEIQKIADKSEEVDGTHIQINADADTTSAMEELGQLAARINDVFRAFGETAGKIQGGIDGFESKLKQADNWIAGKVGGIFKARGGLTSGVGYGIGGGNAQYSPMATAVGVGTQLGQGGINQGVIHNERGREVTMPIQNATYMRPFAAAVANELQAMGGGLGGGGVQEVIVPLYINDREFARATNKAMTEEQQRVKRIANRAVGKKVKETFK

SEQ ID NO: 63 - protein, 1330 aa, Phage F168/08
MTCSNKPNYTPFKLQGLAPTKQWGLGRSASYERFNPNEFHALEDEVKITFPVDFRGKVKGNSNPNPSRGFSHASQIYRENVLRGSQFLSKPSLLFNGAVYNEKTVYNGAMVASTQEVNQGLMFYWEDFINPDPRIKEGDMVTFSVDVRSTGEDIPTGAVAFKGTSNFEEYYKVLEQPITKEFTRISFTTRFLSKDWEWDEAFGMFWGAENVPVTDYPMFQYDKDKLVGFIQAQESVQLEFSRPMVSTIGKTAYIESGDDMFSNNKWDWSKAVSKGRLNEFDGKYNTNGIKQDWAMPEFIPIFKGSERIHFYKKTTLTETTDAGHGYGKILFYSAANEDSYMNVYKKFPHEAGVYGGYAAEVEVPIGATHYRVHITSERGSATTEAYVQSSANDWSEFSQEWYDGLSGKLDGKTARAETFYRKEMVEMEFELHFAEAVQKALPNIFKDLTTDAEKQQRLRDIAYQFDSTMIARGRGQGNNLADWIFYRWAPDGSIEEQTMKQFRGEGLTSVTHPSSYQEWINPQGRIVTSLRSNRIIPNSMYMGTDTLSGKYDPKLTTLQLEVNGELVDKKAALDKTSEVFTFTGLKGFLKPEDKVRIAGWNNRNNQWSITYSNVLMGNTPENIAEFNERAFVEADYLVTNMSVIVTQSQMDEWGFNPNLPDYRIESLERPASRTEEYMINSMVQVTHAYDIYGFIESNYPEFYGDCYTFDDRIRKINERIKQFNIVATTYSEEPWEDGDPTIYICAEARNPDRDYNVTSEINQTVELQINNSKGHFIHPNGYIYVGFARMPRSDRETGISVESELSFDFTMDRQYDSLPRVFRYNYQKQPWFLFVRNINRSVLAPKVNTLTPINGGTRRYNFGATEDARYISMDCFIKAPAEEDMPKLMEELADFLDVGETVIQFSDNKDRYYKVILDGSTDLSQTLHVGTLTLTFVLLENTAIGEEVVESFDIDSTTGSVPFIELENMGTADAYPTYQLTFEEPVGYVDLIGTDTSANVSIGRRPKDTEDEVKVDLRPRKFYSKFTSTDGAGWTAMNDTQLPQIEGYSTKLQGTVQRVNGMANQDKWNYGDTSHRGWHGAGIVANLQKNLDDFYMEASIVATGKPVKTSANAIFLIFYDENNNPYAYTKVGTRPQEGNLDSYVAYAGDWGKRKVVNNGAKWKDFWGKVSVQRRDNRWRLIVGQYKDRRYSPSPEASFNFGQNMLKDTRDTGWFDLPPETWGKKFARVGIFFGQYSHRPKLGHLSVRRLVVWENLEEYGEKPLEGTPILFHEGDTVVIDSSKAQAYLNGELTPSLVDPMTDWFPITKGDNYIGINNFKGKLDIVYNERFK

SEQ ID NO: 64 - protein, 198 aa, Phage F168/08
MITVLNANGQTVAHFVNNVSEGVPYFEPTLTENIETLVSTFSFSVPLDCDESQYLKGLNKVLVKDKDGDLRQFNIIHTEEVFQEVDSRILVECEDFSISEMNDTVIYPFNGHNLGDTLTKAVKGTGWGIEYSADTWQEGEEPFILAEYTNMREVFGNIQKTYDVDFKFTAERTAFNQTKRIVKVYKKQRSSNRPLLHL

SEQ ID NO: 65 - protein, 643 aa, Phage F168/08
VQYNTIKTAILPYYTGVDGKVWTLKGMVPVNPIEGITKDKESPLVVHNQAHADYDEPFFFKAMPFKASSTNPEQVYRQGVEELLKHIAPIYTYTVNVILLNRVQGWEGETLALGDTVWMKERVGSREIGLEARVIEYIYHEDDPSLDEVTFTNFREIDTYDTSDIAGIRDALNDLKDQVDSNTVIIETTREQISKLEEGQSGIIEDLGNKNSISIGDTPKPNPIDGDTWFSTRVNEAGQTIHEIKVWDGVEKVWKLSMDTSKAFEAEDTAKAAQKDAEESLDKANQAVADADTAKTAAQEALDRYNNLMISGRNLALNSQKITVPDVVAGTTTRRKTIPLSIPTKLGTEYKLKFKYKLTEGTLPEGITVGIYNVPKLAWASNIVTIPTEGKDEGELFAELTTNATEGDVLLIYQGVRSAVKNDDNFDFTEVYLVEGDKIGDWQPAPEDAIASITNINGEITSLVTKTDGLETSYSQISQTVDEIQFTVGDKADKSQITQLQDQINLRVEKDDVINQINVSTEGIIIDGAKVQITGKTYIEDAVITDAMISGLSATKLTAGVIDASKINVTNIDASQIKAGTIQGIDIIGSKITNPFEIGSEGYTLAGQTVMERAQVKIDYSVSETGQKRLVNTSCKRYSKSAT

SEQ ID NO: 66 - protein, 183 aa, Phage F168/08
LTTAFQKLVKKGWSILHARGIQNQLLNLDGTINSFSSLASDGLSIQDSLGNSGYLSAELLMQFSNTGKKIYPGNSWVTNTDRIVPSLTMNKCAIGWLFLWQPYDTTGGKPYTWDYTYYLVPKAHANFNSGKGINMRLQGAGKGGGADDTVYKYVYVSNDSITGTVNNGTGNGAKWVLTGVFSV

SEQ ID NO: 67 - protein, 95 aa, Phage F168/08
LRVWIEDKVGLLTGYSTEPLEGYKCVNIDPSESLEMLGGMLDFHNYYYDGEKVYRDTNNDFQKFLEEEANKPPEPSKEEMEERLAKLEALLADLL

SEQ ID NO: 68 - protein, 237 aa, Phage F168/08
MVKLNDVLSYVNGLVGKGVDADGWYGTQCMDLTVDVMQRFFGWRPYGNAIALVDQPIPAGFQRIRTTSSTQIKAGDVMIWGLGYYAQYGHTGIATEDGRADGTFVSVDQNWINPSLEVGSPAAAIHHNMDGVWGVIRPPYEAESKPKPPAPKPDKPNLGQFKGDDDIMFIYYKKTKQGSTEQWFVIGGKRIYLPTMTYVNEANDLIKRYGGNTNVTTYNYDNFGLAMMEKAYPQVKL

SEQ ID NO: 69 - protein, 100 aa, Phage F168/08
LDVPHVYLRDTKDCSKITIGNLPTEPFEVTVSAYREPSDITVGMIPVSFIEGDFDKYYEDFASDITKRLKDMAKLKEDSHKQAVDSINKEKVAEVVMFFE

SEQ ID NO: 70 - protein, 119 aa, Phage F168/08
MAWIRTKENKLYKDADGNKVDTKDWKNAPLSMWNTTTFMEYVAYLNQQKFGKVPINASLQTLRAIMKKDIERFGAEALKIFLEMAIKDYHGNSRYPTLSYSQARLLYMERFMSVALEKS

SEQ ID NO: 71 - protein, 113 aa, Phage F168/08
MSIELSQKRFLPNNFNLPCINHKDENPKNNKVSNLEWCTHKYNSNYGTAIERKTKKISKPVRATNIKSGDVIEFSSMKAAHRAGFDESTIAQCCRGVYIQHNGYVWEFIEEGI

SEQ ID NO: 72 - protein, 55 aa, Phage F168/08
MCYDGFIKDLRRGFIMEVWKPVVGFESHYEVSSLGRIRSLDREVYSEKRLIYEIS

SEQ ID NO: 73 - protein, 274 aa, Phage F168/08
MAKGLEAIAQAAQAQSKGSGEQSKKTYLKKGQSIRARIPEDILENLHVNQVVSVFEPQVLPTLSYHAEGRTDVRDLYHEATEIMLADHRAKVESGEIERGSQADKDSYKAARILTPKPLILFGVIPLADFTQGTKKTNTYPAGEPILLETNLGRDNANIDALTNFLSKETNAKKFPKKAFEITCEAANRYTFTPLDDEDLTPEELEVFKATEGATVPEEDFENAIFESTVERQIEDLKKIGFDTTRLPNLPTAAPSPSQGADEAGTVDPSGIDF

SEQ ID NO: 74 - protein, 143 aa, Phage F168/08
MKKDNPQVNPIKFTEEDYFRLLQTVVMTNTFIGSLSAGYQGKERLEKITKIAENMFVLNRLMESAESNGEDWGDEMLLDSLYSDSEVLVTKYKHLLSEAQLESINNSIKNFAESAEKARKEAYEEKVAQAEVIDFKKGQEEAR

SEQ ID NO: 75 - protein, 86 aa, Phage F168/08
MLKEAVSESLWNAAYEILHTTMATADKVIALVTVYNASNLEESTYAYEAIQDSVNKAICGGAVEDVKWKQFVGSLDSDYKEFFEKV

SEQ ID NO: 76 - protein, 66 aa, Phage F168/08
MDYSKFKIGDTVMYQGQLCGAGTVINGNTYTVVQLTSKPRYAFIIDEHGNKKLIQMGFNFAKIKEA

SEQ ID NO: 77 - DNA, 71 bp, Phage F168/08
gcguuguaaguguaacggcugcacaauggucuccaaaaccauuagagaagguucgacuccuucacagcgug

SEQ ID NO: 78 - DNA, 87 bp, Phage F168/08
cggggaguaucauaauuggaaaagcuucggucuugaaaaccgauaggcguguaaaagcguuuggggguucgagucccuccuccucgg

SEQ ID NO: 79 - protein, 41 aa, Phage F168/08
MNVESRNSEKAWNRAIVKAEQEAAKKKMERLAKMRAKSKRK

SEQ ID NO: 80 - protein, 41 aa, Phage F168/08
MKDTVTISKSEYERLLKAEAFLEALEEAGVDNWEGYAMAFF

SEQ ID NO: 81 - protein, 66 aa, Phage F168/08
MILRIGFFWRSNSESLHCKSIEYIDMFQCGEEGYYKVVFKINEYTYEEHLPDSAYTAITLINKEEE

SEQ ID NO: 82 - protein, 70 aa, Phage F168/08
MNLGQLLDTVEYGTRVRLVYYKSTYNSDEYITTFVMSDTLEYTKAYELVEPHIEKRSNYNLCYSRWKIMC

SEQ ID NO: 83 - protein, 44 aa, Phage F168/08
VETMYTVIYKNAVESEPALEGGSFLTDAPKTDGLKLMTFGTRVF

SEQ ID NO: 84 - protein, 72 aa, Phage F168/08
VWNQWTLYWTDRETGEEGNFKIPRPNALFIGMPIDIDEYRYTVTAVSTPTKEVWTERIPFDFGTKPPWEHNN

SEQ ID NO: 85 - protein, 314 aa, Phage F168/08
MLDTIHLTKDIQIHIDIQEYLERFEWNRAKWTEDRLIAASPFRDDNHPSFFVNYNNDWAGTWGDSGTGDSGNFIQLVAELHETDYETALEMLKEEFWIKPYEAPAISVKLSVKKEKSIFDIPTHNTSKYLLGRGISKDTQKLYRTSEDESKVCLPYINGMGLATALKYRRTDNKDFFYEAGNNHLKNMLFGYHVIYEKLPNTLVICEAEIDAMTAYEMGFVGISLGAANLIERQVDLIKKVDVKNIIIGTDNDEKGNLAAKSIDDAFWKTHKLFRYDMPSGYDLNLYWQEFHKAPPLKKISEPKLLRRKLWYIQ

SEQ ID NO: 86 - protein, 77 aa, Phage F168/08
VAEFLGRTPESVKAKYYELRKQGLLEYPSSINKKWTEEERQYVLDNYGKISNKEMARKLGVKTSQLIQLKWYHTHKK

SEQ ID NO: 87 - protein, 103 aa, Phage F168/08
MRKQTLLEKLKQVTGKTEKELNPTLSHIHIQLCGGSGTGGKFGAAKVPYDYSDNFLFNSPARDTQKDVYKQLEVYVESFKRDFQKDGNINQDERPIKKYLSME

SEQ ID NO: 88 - protein, 156 aa, Phage F168/08
VKIKVMEKTSTAAALLNEYMFMSWQASVILKTNMKQPPAYFLDVNSFQTLYNKFTRNGIAKDIAEKTSREYYEMMELAETAPLVVFDEIGNRSATEAFRADLHDIINKRMVNKLPSIFTSNHPIEYLEQVFDERLADRVRERTMVYNFKGESHRGL

SEQ ID NO: 89 - protein, 377 aa, Phage F168/08
MASITAEMLLSKVINENDVQALNRHGVSEDLFQSPIHKDAYNFIIKFSRENEGNAPSYQTLLQKVPELDYQSSTEESFTSLTKSLKNSRLQVDTAAFINKDLGEFWENSVKSDDPTEFINQTIAALEQIKAEHNVGGASGRRLEKASEWYLEEFYKRKEGLSVKFWDSHFESLTELIGGGYQSGNVYTWYGRSGRGKSTITLVEAIEAAVQGANVLMWVLEMPKYEFASRAISFISARDEVKKSRINGSDYLAGFNIANLTQATFDTAEEEQDFVDFINSLNDKLEGSITIRAVDDEDFMNRSLKQLERDIVENGADVVVIDPFYYLHYEKNTSKTAGGDASQTSKALRLLAGRTKTVIHAITQAEEDSNEKRRRRA

SEQ ID NO: 90 - protein, 64 aa, Phage F168/08
MSLLEDAAYVLAFDSCDSRFAVEVVKGRSGNEGKQVEGIFLPVIGYVEESSDEAVTDVFEGIEF

SEQ ID NO: 91 - protein, 165 aa, Phage F168/08
MIIWSLFDSGNGCYSQVFSEKEGVENYSIGMDKEKGTSKNHLNLDLADMSGYFGESNMIKSLENLPKPDVIIASPPCESWSVASAMAGGNACWNHLKGDPFTIRTSKEYESVQFNHENSFYNRMNGELTVFNLIKIIKHFQPKIYIIENPAFGKIWEYIDKVLGF

SEQ ID NO: 92 - protein, 60 aa, Phage F168/08
FEIKKPTKFKSNINLNLKSENVKAGTEFRKASRIGGSYNVRSNIPLTLIDEIYKRIEEEL

SEQ ID NO: 93 - protein, 74 aa, Phage F168/08
MSFYLSQMNNLKEKIRYEKTSVKLIRESIERIGKPTGEYSLGYTDALKMELLIHQKMLEDAQKELLDLEKERNK

SEQ ID NO: 94 - protein, 34 aa, Phage F168/08
MTATKELWKPLVFKGIHSDIYEVSSEGLVKKQVD

SEQ ID NO: 95 - protein, 118 aa, Phage F168/08
LTDKLLKPQDSGYLHVRIPLEGKYYNARIHRIVAETFCERPAGCNVVNHINGDKKDNRASNLEWITQRDNVIHSIKLREEESKHLSMIEKMDMLLEKLIPSPEAKYNFMEEYVEWLKG

SEQ ID NO: 96 - protein, 342 aa, Phage F168/08
MAKGLTAINKAAGKTLVDTIAEDFKRQLNKWGETGYTYDSEVHHQLMRDYLKIVDRNPFEDFPENVPVFRSSGTGKCLREQTLFAIDKIEGSDRKDPPKMQAHQSRWVQIGTKVGDMIQEQVLMMEKNYRRFTGEDCHFRFERTEEGFPHFEEFSTTFKKYKSGRMEFITGGSMDGIMIWTDPSSGEEFRVGLEVKSKQTTPAATSAFSMRQPNSKHVWQVKNYAMLKDLDLYLIVYVNCAHKSWEMAEEDYAKNPDLQVFGVNITEQDKKDVRNRFFTAIEHAHAGTLPPLELSGFTFSDYKYALANSLTYKELEELEKKAVSKFDQKALEEIKKIRGDVK

SEQ ID NO: 97 - protein, 109 aa, Phage F168/08
MNESIYEGIPEDILQEKFYGVFIKFRCDNRTKPLAMHISELSKEMLDATYLQREAGESNIILKDVNTGLEMAFDLTDIVVYSTKEIALGDTEAYYSFAEHMADMMLGDD

SEQ ID NO: 98 - protein, 192 aa, Phage F168/08
MIKIRFISFDVSSVSTGVAVIDREPSGYLTLVHTDIISTNPKHNVGRRLKNFAEAVQILLETFRPDYVVKEQTIARMATQHILLKFAGVLEMIASNEGFPKIYEYSPTTVKKVVGGHGRATKEAVLMGTTEYINWNEPIDLVIDDISDAVAICLTHIGKEFVLVPLGEVEKAKEEAMIVEAEASKYLEEATE

SEQ ID NO: 99 - protein, 189 aa, Phage F168/08
MKQQLRIAITGTSRSGKDTFAQAIQKKLVEMGFAEAMPIAFADPLKQLYKRYFFYMEDKEKPRDAYVTIGNAMREVNENVWINNLLIQAAKDWDEGFSTLVTDVRFENEAKTLINDYGFILVKVDADPLIRLVRAEALGETLDLNNKGDIEVGMIEPHLTFINNGESDLMQMDKYAEIIINMAQEVANG

SEQ ID NO: 100 - protein, 50 aa, Phage F168/08
MANLLISEKSYYEKLVEAETANEFRMVLIRLINRVVMKVKVPLEVRELFL

SEQ ID NO: 101 - protein, 163 aa, Phage F168/08
MYYERFGDVALPDSLANILSTYYMQDDTRGDLEGTNKFARCSKMEYSFASDKKEKRIRTEDLYKESPINLEVLEGNGYSRNNIASSLDMERAALRTDLLKAMAKADLTEMEKKVLELNLIYDYTMREIEVLPEMPSRSTLSRHLTSARKKDYATNLKYFQKGA

SEQ ID NO: 102 - protein, 161 aa, Phage F168/08
MPRTNNKISRKKALEVYLEGSNPLAAISELIEEHTWTVGFDMESATFYKERTSNPYDTCKNPRCKLCKQIREHAERIPAYSLGKTLAKPFEELSLGHFGKLAANDVAKSDMPKLLKVSMKDINNHIEMLVEKNWIRQFHQPSKRLRVIRTSYPTAFRDWCL

SEQ ID NO: 103 - protein, 25 aa, Phage F168/08
MRQFKKRMYEGKKQRIAEAKKGEWA

SEQ ID NO: 104 - protein, 36 aa, Phage F168/08
MKQYIKIGAAILILLIGVAVWLIEFILPFVLLKWAL

SEQ ID NO: 105 - protein, 64 aa, Phage F168/08
MGLLERITYSLFIALVVVLAVGAFFVGVYWLAVWTSGLGGLGTFVAVGIVMFVFTALAVFLGFD

SEQ ID NO: 106 - protein, 143 aa, Phage F168/08
MKLKDLLEVVDPMQDISLEIAELTAPEGIYAKDIQKLRPMAVEMEVVDVHTAWYSGEDSIETTLGVVVTGGVKVMRKLFEENFTIDEMSEMWYGWDNEGLLYGWENGEAGEVYNILEENGYNMDSIKIMYGAFVTLGELVGAI

SEQ ID NO: 107 - protein, 125 aa, Phage F168/08
MSLGMFDKELLAALAALRWVVEDPEIKERHDEILNTAYMENAYEKGDSFPDEKFVEWDFINALTTFEIEAAARGLITDDEAYDEEDDMDWASDTYSCGCCTCCGCTCDYYMWEDDGSFDEDDLED

SEQ ID NO: 108 - protein, 61 aa, Phage F168/08
MANYYVLKRLDDGSGKLHQVKCYKSLDKAIKYAKEMSTFKKTYQVAGQFDMNRLANTGRLI

SEQ ID NO: 109 - protein, 415 aa, Phage F168/08
MKNSAKDKERLKLVKEYLEEGKVSREEDKLNKNFSKAEALRIYQKVQEMEREAKFDEIRKKEWKKFPIINNIVELASWIDNALECDNEYLAMDFETVGDNGGTDMYREEISGFSLTYRYKGEIINGYVPMRHREEDGSPSHLNIANVKWAEEGIKRVFESDKATVWHNATFDMGLAKASLGIAPRTPVHDTLILMHLLDEDLPSYQLKVLATRFLNIPSDTFEEMFGKNAKFADIAVEIARWYAGKDTYVGFLLFEWQLNILNKPSFAKIKKVYERIERPCIMATFEMESEGFHINMEEVEVQRKESEAELEEISARLQARFGDVNFSSPSQLLKLLYVDNDWSKYVTPDHKSILRGHVGYNEHGISNNKLFALMPNGSVILDPVVNAEGKVVPKNDRNKLQANAKAMKKDCQSC

SEQ ID NO: 110 - protein, 200 aa, Phage F168/08
LTAFVNKIDTFIAPDGKLHGQFNQFGTVTGRFSASNPNLQQQPKKARKMFEAPEGSLILGADFSQQEPRLLAHSSGCQELINIYNEGRDLYSEMASAIFNKPIEECLDGSIYRKNTKMIVLAIMYGMGAYSLADILRIDAQEAQKMIDDFFVVYPEVEAWIEGNKKTVVKQRYVETLFGMRRRFKHENFDILKKELELLR

SEQ ID NO: 111 - protein, 130 aa, Phage F168/08
MKTSTSLKKNWNSLDENDKKLRSAASRALRQATNALIQGGAASQTKLVMNAARIRLKELSEARGEPNSFGFLAQVHDELLFKVPENVTQQEVDAIEDVMINTVKLVVPSKTDIEIGKNWGKMTARKDWFK

SEQ ID NO: 112 - protein, 93 aa, Phage F168/08
MNSLYEQFKEGTLKEGQRFSVTGTIVLIDAEDPALPLKVDIDGEGIKWLKEGAIKYMEPAAEKLYEVSIGGRLLSYYGSDYEEGKWTCFFVEK

SEQ ID NO: 113 - protein, 53 aa, Phage F168/08
MKKGNGHAFLWRSREEPKDIFVQAFPMSFLEKHFPEVVEIAKESNKEEGGNAL

SEQ ID NO: 114 - protein, 130 aa, Phage F168/08
MKRFAIITRIEECTPDEDLLELGKAYEIVNELVGGAHVYVDERHKRYFVDSHQYVEVAEGIFELTLGMLLSKLDEDINTNLEISFEGRATKIVSENYYKDELKDYFDREVKWYSPDTVVDGLSILLEGGV

SEQ ID NO: 115 - protein, 71 aa, Phage F168/08
MEIKVEQPKEILLEVGWRYTSDWIVNSTTVSVEDNVYAYENACYKVLEELCESIDAKYIDICFVREATENA

SEQ ID NO: 116 - protein, 153 aa, Phage F168/08
MPKKYYLKAISMYILYAFIAAVIIGGTFLLVGAFVWVGKYVYGRFGDTVGTILFLSTAGLIALCTALYYEARKEFRKDALRVRIQDPEDGINTQSHKIVYMLPEDVIRQASTIVGIIPKDIQHIESEELRKKGSPCHHEVFTSGVWIYAYHRV

SEQ ID NO: 117 - protein, 39 aa, Phage F168/08
MLREIWDLNYTFKTRGKLMEKLIDRGVGLDGEFLKYLVD

SEQ ID NO: 118 - protein, 92 aa, Phage F168/08
MNYEEFKKEIESIDYLSVENRYDRVLVYSSLGDYPLVAVSILETGFVDYNWRGHVRARDIPVLTEAVEKFAETPYEERFPKKLLPTYWRKLC

SEQ ID NO: 119 - protein, 74 aa, Phage F168/08
MRSVFQKNYYLLIGENYVSGITFTYPWLSADCEPEEPIEVTFNEAFPHLFTNRNKEQASKMLDAAKIKHTWEVV

SEQ ID NO: 120 - protein, 72 aa, Phage F168/08
VLLTELALIFWEEGSVHEVIKRNGTLIIDDDDTLGRGIRNSDDILSYLNLEYPVKNGSSGGRHHEKHWGTHN

SEQ ID NO: 121 - protein, 97 aa, Phage F168/08
MEVVEEGIMKSTGERITRDNIKEGMKVVCVKSIYESQGYFTVGKEYEVVMGNCGYLGIKDNGRDGFIWDCAIFNEDKFVFEILEEPSEKSFFKSFRK

SEQ ID NO: 122 - protein, 81 aa, Phage F168/08
MAVMDLSGIVQSLMKTSLSSRFWKSLQKKASLKALESKIRELNNHQQELFQKRDRINKQAIQLGSKARRLEEAKALIEKYI

SEQ ID NO: 123 - protein, 41 aa, Phage F168/08
LWKALKKELSEQLSEDLTPADITVLNIIPMDKKQSSLITGI

SEQ ID NO: 124 - protein, 136 aa, Phage F168/08
MLTTDFIKAVEKIGLEVDNSYSSVLYVESHDGVVVSINKGCSETFTWCNGTDIHVGSLLELIPLVEEYANTPIGEREKKVSEKPLESYPIEELGEAISKILLNKHNPNAQVVISQERIHFYEPKWSTPSEWALENL

SEQ ID NO: 125 - protein, 62 aa, Phage F168/08
MEDLFKFACTLVLMTVLISGYVAIQLVIIAVAGTFLPTWAFVIVLGWLVYTNYRVLLKGGEY

SEQ ID NO: 126 - protein, 61 aa, Phage F168/08
VNTVYQDTQDIYLKAFWICIDRARNRAGVTWTYLQGGDTPRAINGTANPSIKKDFAAYGQA

SEQ ID NO: 127 - protein, 70 aa, Phage F168/08
MNILNGSEMSRLIYMVECQLADVKCNLAFYQQDSISGSPGIIESLTEDLTELTRIKARLEVMLEQFEKLV

SEQ ID NO: 128 - protein, 71 aa, Phage F168/08
MDLTAEELTFLACLVENNNEEVQDSINIYKSFDKDAAAKVLEKQLLESIRLASRLREESKKSMLIGGLSIC

SEQ ID NO: 129 - protein, 63 aa, Phage F168/08
MLIKKEKKAYLFTIYGLHSYPSVIGVDSYSDSVAMERFYKIWRKHYPKHYKTHKEFTVKKFDI

SEQ ID NO: 130 - protein, 46 aa, Phage F168/08
MIPEGTYLKDSSGLNHYFIEGHIVGVRTGVRGYQTVVWDKELDKNV

SEQ ID NO: 131 - protein, 17 aa, Phage F168/08
MKKRLEELTPDELQQYA

SEQ ID NO: 132 - protein, 153 aa, Phage F170/08
MEDKDYALALEEDTGVWKACETFPTREEAVSAGKLALLSINEGKTYVDSLGMHVEDIFGALPEKGATSFAVGQFNKAVISVDVVGMLESVGEQLYSEYGEVAEDYYPTDEVSDEAIDELHDIIANWLNKNLTQPPSFGSVDDVEKITLEGENK

SEQ ID NO: 133 - protein, 58 aa, Phage F170/08
MNNLTAQDLLDELLELKDQGHALEDYIVVGEPINPYDHYLEFDGWHLDSNTNMIILKG

SEQ ID NO: 134 - protein, 64 aa, Phage F170/08
MNVLKQYIKEVHSVTPYTEDWTKHDKGFLMVDLTVNCYGSLSRREHLFYVDEWEEAKKKGYYMA

SEQ ID NO: 135 - protein, 145 aa, Phage F170/08
VRDEKEVNYFIETLAEERKKKWNGYLTSLRDSVTLREIRTSYSVMTGAYIVFLYIYNYDLNKRTIVKATLDDWRMPYVDLGEFEYFRELGKMYDDKVREALDLYVRQIGRSRPESKALGIRRYKEVSRNNRTQTRKFKPRKGHVK

SEQ ID NO: 136 - protein, 227 aa, Phage F170/08
MLLNKHWNSDEEDLILLGDYVDRGSKSAEVLGFVYKHILNGGTALLGNHDQMLLDFLTFPLIREADYEDLSEMYAMWMYNGGDKTISSLLDLDEHLQDAFTTRKMLLEKTNVVEVISLLEPYYEHGDTLCVHAGIPVYRQPDWKTATKDEMIWTRPLALQKNKTDKTIVMGHTPTINLRKENSYDVFLGDRSIFIDGACAYGGQLNAVVVDSKGSLLNTYKQESLSK

SEQ ID NO: 137 - protein, 159 aa, Phage F170/08
MTMHTENLLAVTIFLLIQMAVVAFIFTKGIIVYDRLLSEYRDVVGIAFSILLFGNGAMLIIHQVIAIFSIWFNNSFRESDVFLAQGYFIVLLLLYIALNVYGSTLFKNIRVNIKNYINYNARSKNYKLALVIVITFIVNTVLVLATYWLAEVVKGAIIH

SEQ ID NO: 138 - protein, 83 aa, Phage F170/08
MKPDYSSIIGKRFIPKKRYPRILMKEVYPTRVFYDFPRVLPWEKAPDIPLRVKFVEFTFIHEGRVEKERYTYYSFFTHFERSG

SEQ ID NO: 139 - protein, 203 aa, Phage F170/08
MGREYVISDMHFFHRNICGEASFMDTRKQFKDVEEMNEYLINEWNTTVRPEDVVYHLGDFAMGAKVNSIANVLERLNGTIWLIKGNHDNSPLRKEIKRNTSLNDRVHWEDVGIILKRMHKVVHMTHYPLILGDRGNLINLHGHIHELARPEPNLLNVGVDSPELDNHKLGKPLLLEDAIRLVNKKQVNFNKASRAYSIHGDLQ

SEQ ID NO: 140 - protein, 116 aa, Phage F170/08
LNYLYYVIILTMAHAVGDYALQSDYIAKGKQTDLYLLIIHVNIWTYIIVATTLFLGTPVKLGLIVVCLWVPHFIMDYLKAQSAWFLKTVPNKKTQLIIDQTVHYLQLAVFVWFATH

SEQ ID NO: 141 - protein, 38 aa, Phage F170/08
MKLVTCPECGGNILEGAPNEYGFECDTCPYPYKEEDLI

SEQ ID NO: 142 - protein, 137 aa, Phage F170/08
MTYRMKCVITNPQEPFFTEGKEYRIAHNNTIGYFIKDDDGTTAESGKTRGELLNKLNEYWYSQFELIEIEPKQPINECTEIRKKFQQTLIQYNMDIGHLEGRLVGKPSNIISTQIAMLKVKREAVQELYDELFKEDS

SEQ ID NO: 143 - protein, 128 aa, Phage F170/08
MTVKIRCTLKTEHIFTEGKEYDVFYDDARGYFLRDDEGDIIESGATPELLLAELNNYWHSKFELLGAEPKKLTLYLGIDKGTGTNMAVGTSLQGVLEKVKELDIYFSSDSDFYANYKSQYIIEEWETY

SEQ ID NO: 144 - protein, 91 aa, Phage F170/08
MTKLSSAWLVKFEYRAVKMRAFTSYDKAVTYYNEMVQNIDEQIEESYYETKTTYTDDHKPLLTQFIYWNEDRTFRNILGFVSIKEIELEEN

SEQ ID NO: 145 - protein, 75 aa, Phage F170/08
MIRKQLLFELEVEVDEPMVGRNGYRTVMQTTRLYAYSLDDAYHAFRENHRYIIKSIKEVEEEINDEIKLSMVSEI

SEQ ID NO: 146 - protein, 57 aa, Phage F170/08
MRIRKHANKIIGWLFIFLAVLTIVKVIVLGKPLDGFDIVLYVLLQLLYGMEKLSNDE

SEQ ID NO: 147 - protein, 114 aa, Phage F170/08
MNELDGISKLEADIIKTTQLLETQQELKKNFIRNEKLSKRNYELSIDVLKLRNTLLDVMEDLDNLMENVEGIKEDANKHSKVEKEMVKGWLERTGKLANETRKNIEEVLESYEN

SEQ ID NO: 148 - protein, 84 aa, Phage F170/08
MVLTMNKPVRATSEQVVYREEYANGWAVEVIHSLKGFGHIYVENKPYSVAIMKPAENFADYSTVGTAEEVLKLIEEVVEYEEDM

SEQ ID NO: 149 - protein, 84 aa, Phage F170/08
MTIIDYGSKPLNNCSKNELLDIIQSQLENEVKLIKLIERTTKEVEEEKEVPHYKNYISPEKRSYLEGMERVENIVRNFYGFNNE

SEQ ID NO: 150 - protein, 111 aa, Phage F170/08
MNYRIVSYENSQEWLDAFNEFSGNSFKMNEAIHPDIYEPIKTAVLLFNHEVAEGEAIRLEKIDESEEDTCDHTYETYAVQTGYSSIDIEQAGFCTKCGHDTHKGYKEYTLK

SEQ ID NO: 151 - protein, 145 aa, Phage F170/08
MNNEVEVPKQVKEFIDKQREQLMDKLQIILEGQRYSCEYPKSEFSKWFFANTDTFIQAVANTASLPKYYVVMPEKQKRDYGLLLRKDGKLAVSILPRNEPLSQDTLSKLKDYYLTEAEIKEIDERYWLFKKTREELSYELQNCII

SEQ ID NO: 152 - protein, 153 aa, Phage F170/08
MGKQILKGWVTIDNSPGAETNEPYLIKEKVKEIEYHHEHRALNMLICNALHALGAEDTTTEEEYDGGISSKYHLDNAEIQIFSAVERTSLEDITKNIVLKSMGVLDFEEGWYGWSSFTIEGFETNTFKLGGHDILNIVRQLEGKYVYITIDKV

SEQ ID NO: 153 - protein, 75 aa, Phage F170/08
MELMIEGVSRGEFSKQFIKVSQTTEATVDIAVINRTVEVFRPDCVHEQTVTLTKENLDLLVTAIGYTKERMSNHG

SEQ ID NO: 154 - protein, 143 aa, Phage F170/08
MFYKIIELMAELTKEIKEIKDTLGCSMPIAEDRKVTRIAYLSEQLDDLNSLLLDIPVNYHETWLLDEPLTQNTPYEFHIEVMVLPYGEMGVDVKCYYEEVASSISLGVDEFRTLPDTVDELQERTFHNFHGLSREEAINKWSL

SEQ ID NO: 155 - protein, 76 aa, Phage F170/08
MSKELISCGACNEVFSEMDEVVRLTDDSMYHKDCVTLYSTGYCAFLDDEYLGDTENGEGEPACFFLEEGEYIEEEE

SEQ ID NO: 156 - protein, 143 aa, Phage F170/08
MGLTKIETREWYNSDLDKLHKEGRDIYVKLKIGKRLTYGEYEREPNNGFQVINNEDTLPLILDNYEVYTETTTELTEKQLIVLVWLIHYLERTKLTIADSLHNLISGKANDATLQVWADLSSVEEAEVIRELVDYVIDKGGSL

SEQ ID NO: 157 - protein, 50 aa, Phage F170/08
MANKVSLENLLAMAVTAKEHEMSRHANKMRQLEKTEANIKKRIKELSKEG

SEQ ID NO: 158 - protein, 255 aa, Phage F170/08
MDFDKIYKDLVMDIIKNGVTELPEGTRAVYADGTPATTKFIEGVNFTITPDMGAPLLRSKHVGIKWALTELQWIWQEMSNEVSWLKERGVTIWDEWEQEDGTIGKAYGYALFNKERFIPVYSGDVELAKNRKAGSLIPKVVPKKGGWIAGTHQPYLKLNQVEAVIEQLKSTPNSRRIMTTLWNVEDLYDMSLEPCVWTTHWTVVEGKLNLHVKARSSDVCLGLPFNIIQYHALQLVMANTVGLELGNLYWTSDNA

SEQ ID NO: 159 - protein, 255 aa, Phage F170/08
MNLQEKYEGINWNKIDDVIDQATWKKLTEQFWLDTRVPVGNDVNDWAKLSDMEQDLINKVFGGLTLLDTVQSESGVHSLLDDVRTQHEEAVLNNIAFMEAVHAKSYSTIFSTFNTPTEIDNIFEWVATNKRLQYKANIINDIYRNGTPLQKKSASVLLESFLFYSGFYTPLRYLGEAKMVNTAEIIKLIIRDESVHGTYIGYKYQLGFNQLPETEQKEMEQWVIDLAFKLWENETQYTAELYSEIGWTKDVNTFL

SEQ ID NO: 160 - protein, 255 aa, Phage F170/08
MNTYIELNNQLNIPNNGKIQLDKDKEAVRAFFLEHVNKNTVFFYSLEEKISYLIREGYIDKTVITDKYSMEFIKKLFKFIYSKKFRFDTFMGAYRFYKQYAMKTDDGERYLERYEDRVAFNALTMGDGDEELAMKIADELINRRYQPATPTFLNAGRLRRGEYVSCFLIQVEDSMSSIGRTLNSALQLSKLGGGVGINLSNLRALGDPIKGIEGAGSGVVPVMKMLEDGFRYANQLGQRQGAGAVYLNVFHADIM

SEQ ID NO: 161 - protein, 80 aa, Phage F170/08
MTKVTVYSKDMCGQCLFLKNMLNGKNIPFDEKNISHDEQALAYLKEKGVSSLPYVEADDGFSFNGVRPDLVKKLEKELGV

SEQ ID NO: 162 - protein, 88 aa, Phage F170/08
LATRNKIGTYTNDEGNVVVQMAGSKAELLELLSFLNAKYLLEVTDTPEEYQKVFNRLQVETGKNYSVLLLDKVTNKSQESEDFLGDKV

SEQ ID NO: 163 - protein, 101 aa, Phage F170/08
MKTTDLQKKELLEKDLRSYKKLYELQKSIKEEIDELKSSIISDMEELGESKISIDGGTFKLMPEYKRASADTKLLMNVYPNVWEKVKNVYTVNKYIKFTKD

SEQ ID NO: 164 - protein, 76 aa, Phage F170/08
MEEKVPKPKVLKRVREARGESLRELANMIGVHWSSISYWENGIKEPRVKNRVKLAKLYNIPVEILFEEDNGQELPL

SEQ ID NO: 165 - protein, 74 aa, Phage F170/08
MKKFYGIISTTTTRTEEYEKKLKNGKTEIRTREVTVPKEITVQSSQPDRLGARKELEAFARKCNGKVTYIGAFA

SEQ ID NO: 166 - protein, 94 aa, Phage F170/08
MILQILGERKYDCKDSTEEPIVKPFIELIDGVQFLLEQENAFSLLNSKHEEITRVPNSPYEYRTEKEGYKTFVNSVYVLNDEGKTLRRLFERGL

SEQ ID NO: 167 - RNA, 71 nt, Phage F170/08
gcugauuuaguauaauggcuauuacuccgguuuguaacccgggaaugggaguucgacucucucaaucagca

SEQ ID NO: 168 - protein, 255 aa, Phage F170/08
MKVINYGSNYEIYANDLKTYDKLPAQTYKVRFNPMSGFSLAVTDDFKLKESKVYGDRLVKIEKVLHTFKTINRSLGVILSGDKGIGKSLFTQILSQRAIEEGMPVILITEAYPGIAEFIDSIDQESLILFDEFEKVFNDRDGRESQEKLLSLFDGLSQRKRIYALTVNNLNRVNDFMLNRPGRFHYHLRFDYPDADEIRTYLQDKLDKAYYGEIDSVVKFSRRIKLNYDCLRAIALELSFGISFGEAIADLNILN

SEQ ID NO: 169 - RNA, 74 nt, Phage F170/08
ggacguuuagcucaguuggucagagcauucggcucauaaccgaacggucgcagguucgagaccugcaaugucca

SEQ ID NO: 170 - RNA, 74 nt, Phage F170/08
cggaaaguagcucagcuugguagagugcaggcuuugggagucugaugucgcagguucaaguccugucuuuccga

SEQ ID NO: 171 - RNA, 74 nt, Phage F170/08
guagguguagcucaaucggauagagcauccgccuucuaagcggacgguuggggguucgauucccuccaucuacg

SEQ ID NO: 172 - RNA, 72 nt, Phage F170/08
agucgguuaguguaacugguaacacguuggucuccaaaaccaauaauagggguucaaauccucuaccgauug

SEQ ID NO: 173 - RNA, 73 nt, Phage F170/08
ggcaguauagggcagagguugucccaacacguugucagcguggaacacacggguucgagucccguuacugucg

SEQ ID NO: 174 - protein, 112 aa, Phage F170/08
MNYPKREKVVEVSLTSGTYSVFPRRLGVTTNDAMSIVNGAMKGAELPMIPVHKLADRDSELTYVNAFQIQTATENVVDVPERITSLYTKPEDETPEDEEIRLGTINNYFSLR

SEQ ID NO: 175 - protein, 114 aa, Phage F170/08
MNDYQVNDLVLRLQRLEDKLQHGELTEKGIKQDNVELNSAVSELRDIVNSLDKRLAVHEEKYAHLTYQITKLEETIDALEGVNDKEFDHKRDIVENVFMIVLGAVVTYVFSMFK

SEQ ID NO: 176 - protein, 86 aa, Phage F170/08
MYETALVCVLLLQMFVYLMSYYVTRALQYKKLQAELSPLASYKFTFVLYGISIGSLYLFFNGYYIPIVYTVGAIIGILVCLWFTSD

SEQ ID NO: 177 - protein, 89 aa, Phage F170/08
MDNSKRIIKKIIFITISALVMVTLSKLFSKYVIVEQNAPFQALIGGASCALLSSILFDWYTNKKKKENVENQLKEAISDLQKIKAIIKR

SEQ ID NO: 178 - protein, 92 aa, Phage F170/08
VSITNKDIKDKRRYIFSQSSKTTTIKRGDKRISSATRICAVCGRPLSKLVLRTGVPTVVVDHISCKISDIVRLNVCEDIRSCYAYSSKKGES

SEQ ID NO: 179 - protein, 142 aa, Phage F170/08
MGMADRLKDNAKQKKLERTPEQQLRDTFNQASIKLINQFMANVTSGAIEVDDIADLTRLFQIYLQVNNINDGMQEGTGTLPALTSEHKDIISEKVSTEKIIKDGEEEELISLDELASLPDDQLEEVLVNRELQMNRENEATF

SEQ ID NO: 180 - protein, 255 aa, Phage F170/08
MTTKAQHIAKMAKEMYGTDKITTEQLAYITDMLTPSTYLLRNHSVRNHPITFIISGRDATKAQAHRPWQPKIINDQHRDKAIIKSRQLGLSEMGVGSMLQFADTHSYDAVKCLYTFPTNEQMTKFVQTRLDPVLQNGYYSTIVDQEVNSLKAKKIRNSFLYFRSSSKPGAVEGVDIDYLSMDEYDRVPALAEASALESMSSSPYKIVNRWSTPSAPDMGIHGLFKGSDQHWYLHKCEKCNYYNEMSYDAYTPEAP

SEQ ID NO: 181 - protein, 255 aa, Phage F170/08
MVDNNVKISKSTIEGLINKSLSYEYVIKNNELLTNEYQHIVKAYGFDNFYDMYLYADSCDSKDMYLVKGGQKDLSKLKPVKRKVVRNGKTMTTTIYEDTGSSDNNNSNPLDKESKKKKELEPVNAKELRKVSLGSDEEEKLDPKKIAKLLADTKKFGNNFDTQCTDYLILEQDSVTRGVVGFTREGSYLKMSFSMSDEAVEGMKMLAFSQLTLKAWKLGLGAKISTDNAPDVEELISLYGYKRNKTEYIVSMSSL

SEQ ID NO: 182 - protein, 210 aa, Phage F170/08
MELIMNNKKLDELTNKVATDEDYDIFVEKMGNLVKDLYENYQFLQQNPPEGDYTSGYFLGFQVIRAEYPVEYENLFRLAVDKNLNELEINKRFVEAVKDGKVLPLGEAVIDELQTGCSSILQAQEVRVNIVFGTKEYMAKQEEERKERQAKLEEERERAMEVLKTKDDVLNTLRVTEALANELTDEVAEKYDLMELVNSMREGLKAHNGN

SEQ ID NO: 183 - protein, 114 aa, Phage F170/08
MEIKNSLGKALIKNLRLLKEKRDAMPDNLEYTSQVMIPVPYYLIKKGDNAVESFLMCAGMINRNKDLGLPISLEKGKQQVKLNNGELTTIVECVATYSDKTDIDGVERFLVEHL

SEQ ID NO: 184 - protein, 255 aa, Phage F170/08
MAGEVFSSLITSVNPNPMNAGSRNGITIDTIILHHNATTNKDVAMNTWLLGGGAGTSAHYECTPTEIIGCVGEQYSAFHAGGTGGIDVPKIANPNQRSIGIENVNSSGAPNWSVDPRTITNCARLVADICTRYGIPCDRQHVLGHNEVTATACPGGMDVDEVVRQAQQFMAGGSNNAVKPEPSKPTPSKPSNNKNKEGVATMYCLYERPINSKTGVLEWNGDAWTVMFCNGVNCRRVSHPDEMKVIEDIYRKNNG

SEQ ID NO: 185 - protein, 212 aa, Phage F170/08
LKKTSILGLSLLSLGLVVGLGTEAKAEEVTENGKTYWKVESGDTLSEIGAKYNLDFTNIHKVNKGVVADPNVIFVGDKFLLPLDENGKLVEQVNTTEPDIEVQYNAPVTPEQPVVVEQEVVEQPVVVAETPAPVVEAPADSSSAKEWIAQRESSGSYDATNGQYIGRYQLSASYLNGDYSPANQERVADEYVAGRYGSWENAKSFWLANGWY

SEQ ID NO: 186 - protein, 114 aa, Phage F170/08
MGYIQDETWQMVKKVAKKNGFVGDWILIIHSYYEYGGNHVQIHTTINGESYRILRLLDSREILLLDRKGNPVIYDYEIVNDGQKSFFYNDMEEKEIEIPNGRCLNDKTRVKIYV

SEQ ID NO: 187 - protein, 255 aa, Phage F170/08
LPKWLDKALGIEKSSIEETRNMENYKMHLREIDTNVVNNEPYSMESIEKGMNGKTTAYMQPIIGEMSVNPGYKTKPSIRNSQDLHKTLKKFGNNIILNAIINTRSNQVSMYCKPARNSETGVGYEIRLKDIEAEPTSHDIANIKRIESFLENTAQFRDPNRDNFTTFCKKLVRATYMYDQVNFEKVFDKDGNFIKFDTVDPTTIFLATNGEGKLIKNGERFVQVIDNRIVAKFNERELAFAVRNPRADIEVGQYG

SEQ ID NO: 188 - protein, 255 aa, Phage F170/08
LSEVREKYSIFVPLDIENSIQKSESVNDGEWYVQGYATTPDLDLQGDIILPQGIDISYFIENGWINYEHKNDAEFIIGAPTSNCYVDVDKGLFVEAKLLKDNKYAQSMWKLANTIQKSGISRQLGFSIEGAVVSRNAQDNRIIEGVKIHNVALTTHPANPRATWETLVKSWTTGYGTAPDAQVDAGALRREMFKEDISNLTYAVRTIAGLYSKKPAEKEFILREVAKDIEVDTSENELSKFMLQLSRGISLKEAT

SEQ ID NO: 189 - protein, 255 aa, Phage F170/08
VAKTLNDIIEDFDAQLNEKVKPTTDEEITKSVEEPTEPEKVEEGAEVEQEEKPNESEETAGNDGEESGVTETVEAEQEEPETVEEVVVEEPVEESAETVEKSDKTKENKDEEEEEDEEDEDKKKEKDKKDKDKKDKEDKEDIEKSTEVEQVIKSSEILGAMEAIFKNMLGLSEKLDEIHREFKEAKEAKEAKEKDEAESVEKSLLDNPEIKTGKEDSEGKAVGFVNKSVAVEEEVATEEPTVDVVVDGEQDTAEP

SEQ ID NO: 190 - protein, 255 aa, Phage F170/08
MTEKKNTERQLTSVQEEVIKGFTTGYGITPESQTDAAALRREFLDDQITMLTWADGDLSFYRDITKRPATSTVAKYDVYLAHGRVGHTRFTREIGVAPISDPNLRQKTVNMKYVSDTKNMSIATGLVNNIEDPMRILTDDAISVVAKTIEWASFYGDSDLSENPDAGSGLEFDGLAKLIDKHNVLDAKGASLTEALLNQASVLVGKGYGTPTDAYMPIGVQADFVNQQLDRQVQVISDNGQNATMGFNVKGFNSA

SEQ ID NO: 191 - protein, 87 aa, Phage F170/08
MLKSEILINKTVTTAFGEVTFDHNGETTDLTVEQQEHLGTKVPYIQYIPDAPKAKEKEATAEKADEAPKKAKKAPAKKTTKSKKEED

SEQ ID NO: 192 - protein, 255 aa, Phage F170/08
MYPDYGYEEQGDNTYQYQPYAHGNPKHIDLDKIDDIQPADYGWTPATLKQYMFGVEVVNPETGEPLGDTFYEHIIDSAIAKAEKRLDIAIMPRLIRGEHHDYHQSDFNSYMYTHVFKRPIIQAEKLQLEVNGRGLYRYPSNWWKVYALAGHIQMYPTSLMQTGTQFGYEMTFSGYPQLAGMPPSGGQVDAPQMIHIDYVAGMLPRKNRGYNEDWECPADLEQLVIKYALKEIFQQWGRLIIGAGIASKSLTVDGI

SEQ ID NO: 193 - protein, 255 aa, Phage F170/08
MGEKPIRFGGAGETGNPNKQLNTSRVEFETKGMASFIENRGIDVLWERAWLCTCRNPMTLSPKSDCPICRGRGIAYQPAVKLRMAIQSQEKGISNQDLGLLDTGTAIGTTELDSKITFRDRITVPEVKIYQSFIFNVNKRRVANGLFLSYDVNSIEDIYGKDGRILVDGVDFRMDYDTNTIYPNESLIDTNISINMSVTLRYIVIDLLKESRYQYTTFGVKQTQFESLPKKLLLKREDVFIDSEPFSLDIDTASR

SEQ ID NO: 194 - protein, 207 aa, Phage F170/08
MARKGQRPVLFTDSKAILGNLTRAVVDEVLSDAQDVALRNGSSVQRMPSYLIVTESRMAKNGVIDLKPFFARSNKKKYNKKGEWYLYIPISMKTRNMSRRLYDELRAVPVGTKPVTVKMDYLYDRRKQSPSVSSINYKPKSTNVTVIPQSWGKGTRNTYVAFRTVNANSPANSWIINRRNVNDDDMSKTMLRNIDRLMKWKLKNLGG

SEQ ID NO: 195 - protein, 255 aa, Phage F170/08
MIPSLDTYLYKEFEERLRIILSECYIIDEALKGMDKEALESFKNTYCSIDGKPPKREVEMSYSFPQEHLDSFARFVVTLGSSEEDSKSIGGIQGGYEYREGNVISEEATIIREGDKLIINTSKPVADYLNSSDISFAESDHFRIEDNKPVFDFSYNEELEGISINVSYISKVSDDDVAGVYKGYQSNDNVSIIGISSNIDTARCLDAIARIILITMRDSLDEKTGYMLQTLHFGDMQVVIESGETLVFGRPCTVN

SEQ ID NO: 196 - protein, 77 aa, Phage F170/08
VAKETEKVVKKEVKKEQPKKPKGYVHVDTFLDYAKVLYGLNKYQVAGFRALMAGREYQHEDADFVPFLEKYIGKEVK

SEQ ID NO: 197 - protein, 255 aa, Phage F170/08
MAVEQFPRKKVSRPHTEITVDTSGIGGASSSSDKTLMLVGSAKGGKPDTVYRFRNYQQAKQVLRSGDLLDAIELAWNASDVNTASAGDILAVRVEDAKNATLTKGGLTFASTIYGVDANEIQVALEDNNLTHTKRLTVAFSKDGYKKVFDNLGKIFSIQYKGSEAQANFTIAQDKISKKATTLTLNVGAEPESTTEVMKYELGQGVYSETNVLVSAINSLPDWEAKFFPIGDKNLPTDALEAVTKVDVKTEAVFV

SEQ ID NO: 198 - protein, 140 aa, Phage F170/08
MASVGNQTVHTGNTVYLMIGNKIIGRAQSASGERQYGTQGIYEIGSIMPQEHVYLKYEGTITLERMRMKKEDLASLGITALGEDILQRDIIDIVMMDNLTKEIVVAYRGCSAISYSESFTANEVTSESTQFTYLTSAKVK

SEQ ID NO: 199 - protein, 48 aa, Phage F170/08
VKYPYLVELYAKHVIRDSGYIENVPPVIYEDVVKRVEEIKREENLTID

SEQ ID NO: 200 - protein, 157 aa, Phage F170/08
MTENNEKVFTPTPNLSREQLIEKLQRGENLTDEEVNILKYYNDAEERKQLDRIIPGVNDVFSKHYNLKEYGLEFDIKIKAPNIIENGKIQARREAYLEGMGMAVSNFIFQSYQMLATIRVCGVEVPEVLADDEKIYNLYVLGVIAKDYGEWLNSFRY

SEQ ID NO: 201 - protein, 191 aa, Phage F170/08
MKKFKVLPSDPAWQNLTSDQVEWILYNMERDIEEQERLAKGMQLESEFQDYDDSWYDKPHDEFSPIREGDDEEEIARKLSEITSEEDMAKLKARWEASQEVDAIRAEGGTTIEEDTINELIANNVKKAMEEARRIEKHGGNKWQEKSSIELEEERKNLEFNSQLKQGDIQEAIDLFNKDVEPTSLDDEFQI

SEQ ID NO: 202 - protein, 255 aa, Phage F170/08
MSNNYRFYVEAMTGDAVAKLNEIDKLMDKIDSKSAKGTQNFFHTSQKDIDKAVEEMQKLIKAKKELDRAFDNQKINAESMGDMTAYKRAVSDAEELTRRFNKTQKEFQNHARMQANPNYINASTLRQQKAFRDELTEQERAIRNISRAQQELNRVNSRVNHRANQASATGRMTYNQSESMKRDLRRTGVFESLGSENKSRQQELRERYKQRQEELAETRSNTNLDRQVRKNRETSIQAEIKEIEKEIEARKRLAD

SEQ ID NO: 203 - protein, 255 aa, Phage F170/08
MSVELRYPRFDLTFFTETDNYHIVYDAKDGLTGRNNNNGETEKVSNNFMAESVISLTTKNALEDDSAVFSFVLAGDVYWDRVLNANDAVILKIDPDTSSTKKSDNPVLLVGLISEVRLEGDYGENSKMYRITGQSFAKALMQFDLGVIQEVSVVLTDLGWLPDDAQEGIKMSGSSASQIAESLMKRFLQYMKFNFNGQGIDKFLEWELDSWTEAERLIDSTPYINYEGSLKQLIDDVTAKPFNELYFDATPEGKC

SEQ ID NO: 204 - protein, 255 aa, Phage F170/08
LVKRRFQAGLGSEIKRVYKEGQQINTLLLAQVIQVNYKYNTVDLLALQHKEVFQNSYANEGRFSARLPMEFGGRNIVGQPYGQVNPIAVGTVVLVGFINSDKDMPIVISVYNNNDVSKQLSRTQFSNSDPKDLELIGDMHQKFSLYPSLTYDSVDGEGGRVVTFSGKSFIAFDTKEVANSSTTDAGYGTKYEDLETSYYNNGDLIEPMKGRAPNVLFKHQGVLDDDGKPDLHDLLIHINPDGTYRTSMMNKEEDW

SEQ ID NO: 205 - protein, 255 aa, Phage F170/08
MALNGTKYTAFARHRLVLEWRANQNIAGNYSTISVWLYLQSMDKWGRLDAPAIGDAKVTVDGTTQTEKASSMLNAFQKKLLLAKEWRVNHNNDGSKRITIGGSYFVNVTFTDNGVPTYYGTITIPNFSVDLNRIPRRSSLNPVPTLNLPGNLPITINRQSSTFKHNLTAWVANRDNPTLNNDDHWTYLTNLNDVGTSGAFSFTVANNKTIFTALNNRTSWQGKVKLWTIGLDDVVSQERTYKIVPPMNAQASGGK

SEQ ID NO: 206 - protein, 241 aa, Phage F170/08
MVEETQKIFVTLDDKDFVSNWGTSLNSDEPVYEVDLPMDSPFFSHYYSNCFQYVDGELVLSEEKLLKVELLAVASKFKRDCEETYILQKVPYTISGTTYLFDVISDDEFINKITLLDNKIQDYVGITAYATSDGSQLILKFDKSQYTTMTRYIKKVVESRENKLNNKLLPMIENAKSVEEAKEISWSSVPDELLPEQESNEPQDEQSIDSLIKENKELRQKVEFNELALMDAINMFSEMNK

SEQ ID NO: 207 - protein, 48 aa, Phage F170/08
MYPYLSMLYASYVIKDPENYPLEKVPALIREDVEKIVEEMAKKNEKQG

SEQ ID NO: 208 - protein, 229 aa, Phage F170/08
MGQSDGMGGTLKRIAIQVGNDPNKGWYRFQVNPTQYKYNKPHRVTIFKTKSNIITEDFGKDIETIQFSGTTGFRVDSRGKNGADRLKELEEIIDNYAKQGGNGNRSSVEMKFYNFTDDKYFVVHLAPEGLSIERSAEQPLLFNYTLSLVVLREAGQPSERAQVSPQIGNVSPSIGRTYNAQQDTRTPAQILHDEYRRSVMPNTAVNPAVTSGAYNYGVNELKKIIGYGG

SEQ ID NO: 209 - protein, 178 aa, Phage F170/08
MEKVEQSADLLRFFRYLNVDINGEVVANVIDDQPNFISRFYTPHTRVNKISSTLLDIVRDNDIGETNKALSKDSLTYKFLKSGLKLSSPRIYELAQIVVLESFALIYAIEEEPEMFKMINESDVKQTRENVKYLIDCLGGAKDYTDIVMDLQSMDVALGYIQEQVPLIQGGLPVNGTI

SEQ ID NO: 210 - protein, 234 aa, Phage F170/08
MARYKKHLIVYGDTMQSIAQKETGSVDNWVKIAEYNDLVYPYIVDTMQEKMSNLEHLATLGDTLFIPDEGNLLDINTSSLNQRDMDFLLGLALGKDLDMTSDTDYYENHGTSDEVFAITHNGHGDLKIASGADNIKQATISRLMTAKGSLMLHPEYGSDLHLMFGKTTIEQMKIISIEVCDTVLKDTRVAECVLVNHYIEEDRYVGNYRATLQSTREQFEFVVQNDNSGALIIV

SEQ ID NO: 211 - protein, 241 aa, Phage F170/08
MRLKKISEILGRLIDVTMINTHEINDFSVGSTIRSIYEAVSMELEQYYILGRENILWGIEQGVLNAFDFRKREAKRAYGMVTLEFHTVTQTPVYVPTGTTFDSSLSGAPSTLTFQTMQDYIIPEGVITAKVEVYCTTVGTKGNIPKGRINRVINNISNLKTVYNEFDFLTGTDEESIESVKKRFHAFVESRGRATIKALDYGTRQVEEVAGVYIKEEVGYVRIYAHDLNGDLKQETLDKIK

SEQ ID NO: 212 - protein, 255 aa, Phage F170/08
VSNFYKNIHPLLRRGKKPNKYDDTNFAVLNALNYELTQAEQETIASKIHSSLETATGEYLDTWGDWFGVYRKDDWNDEYYRKRIIRELLLKRATIPAIIDALLDFLNDNDAVIQIYEPWRNIFYTNKSKLNGDDHLMGYYYRFAIIDISIDRPFPPEIVEIIKAFKPAGVLFYLRLDTSLNKNKTTVESPYVYLDVTNKTELEFLNGLYYDLRGNINLSDQRTQVVESNIFHTNNSMLNGEDVLAGAFDHGRGYI

SEQ ID NO: 213 - protein, 181 aa, Phage F170/08
VAIATNNSRVYASLQLKNKQDSMYLAIGKTTPWTNEDAPPAPDPNTTTLTEVIGYKKVARVSLCREYLPSDDSKYPVVSYGSRKFTLIPDEDGYKEQAWMVYVEAEITGDELPTGTFRQVGIHTDLVSKASSEKKALLPTDVTDAGILQFFENRQQQNRTSDVILKEKFIITMENKKSVKQ

SEQ ID NO: 214 - protein, 255 aa, Phage F170/08
MAKNITNDDLGKEPYNNRYYQGKRFSGLLFKPDKPLQQAELNELQSIIQGDLGNVAESIFSDGDIQTGMEYVLQDKKLTIKKGKVFLGGKMRNFDEQSIDITGEGTEYVGVKLVQKVITAEDDPSLLDQTSGVPSHFSEGADRLDEDVVLAVNDDSASNIYHFVNGELYINPDTPEMDKINKILAERTYDESGSYRVRGFDMYTEVHPTDPNNKIQLVVDSGRAYVLGFKVDKPTTTRIDIEKSRELETINNEGF

SEQ ID NO: 215 - protein, 255 aa, Phage F170/08
MGKFKDLTGQTFGKWTVVDIDETKDRIHWWCECECGKEQSIRASSLTSGNSKGCRECTRNNLMGKTFGRLAVIKDSGERAKNGNILWECVCDCGKKRLVLGANLLNGQTKSCGCYSTDILKKVSTKHGLSKVNGKKTKLFMTWDAMRQRCTNSNHASYKDYGGRGITVCPEWLNNFKSFYDWSMDNGFSNDLSIDRIDNDKGYSPDNCRWVDAKTQIRNRRNTVTYNWKGSEYTLAELGELTGINKMTIKSRLNR

SEQ ID NO: 216 - protein, 68 aa, Phage F170/08
LPETHRQTSSGALIFKPTIAEQEHKNAMESIKQERTELEKELANVKAIKDELSKELADIKQLKDELSK

SEQ ID NO: 217 - protein, 255 aa, Phage F170/08
MRLVVDIMHTQIRYEDSENYLRPEIHKVMHSELGVKADGYQFSPAYKAGYWDGIIDFFDKENDTFPTGLLPHVETILGNLQSTLSKSGYIFQFEIIDDRPDEFMSVEDMDKEIVLNGDNNDKITLRDYQYESVEQVIKNRIGIVNVSTGGGKTEIASGLIQQITPYLESGERIAFFTNSSSIFSQSIDRIEKRLGIKVGAFGAGKKDIQQVTFVMIPTIVSAISADPEAKLKLTAKERMYKKIAKDIAPKFERGF

SEQ ID NO: 218 - protein, 255 aa, Phage F170/08
LQSPCLNIELKEKFKLNKGITDFLERVADKSQRWGETVASPIRKTDMAKETGKNPRTITRYINQLEELGLIKTETKRGMNGGTLVVFNTDMLNFEPKENPITSDTKQAKEIREQVFPKAPTKVPKRRYRTKAEIAEARILSEKLKKREDILNDKIEFNVVTRSFFDSFDEPEVYFKGYLISRMYNAYVTIIPYEKYNRLKNLDEKKAKQQLRAYESSYNYDVLPRRFVGTPQYKKFVELAKYCEENNINPLVYLT

SEQ ID NO: 219 - protein, 255 aa, Phage F170/08
MSQIQKQVIYRALSEPFFAKEILSKIPMDEFKDSGYEMIVSTINLYYRTHDESLEEQSLLTLVEDKMLKQNKSLEAQNKVFEVVSDLYELENEDVDSEVISENIQNYVRKVLTREAIMKSVTNEGTLGSDSNIQQLMDDLRDILTIETAGNNSELLDFFDDVDKKMELLANLQQNKYPTGFTAIDAISDGGLARGEVGMVVAPTGGGKTTWAVNQARNYVVRGLNVLYVPLEEKVDRMIVRFEQLLSQQSKKNIL

SEQ ID NO: 220 - protein, 255 aa, Phage F170/08
MKHIINFSDFHMHFFKDFSKPDPEYGTDRAKEQITILDNLMNYARNKNGDVLFNGDMFHKRVSIDVRIFNMLFQVISSYPDVDVIMVSGNHDKVTNSLYSDSALAPFSALPNVTVCSTLNKIVKDDYTLYAVSYGEEVEEMKAWIKEQADNLDHETVNILSAHIGVDGSSTGKYSHTLGGAFKVADLYPDKFDIVTLGHYHKRQFLGNLSNVFYVGNTLQTSFADEGQEKGFYDITIEGKKWEQKFIKTDYTPFE

SEQ ID NO: 221 - protein, 255 aa, Phage F170/08
MLKFKRVSAENYMSIGSVSIDLDNQGLVLIEGINDTNETFQSNGSGKSTLLSTVTYALYGATPSGLKADAVINKQAKKNMSVILEFEKDGVPYRIERYRKHSKHKNTTRFFQGTNDITQKSVADTDKKIQDVFGIDYLTYANSIMYGQGNVEIFATATDKGKKQILENLADIGVYRYAQDVAKERAQKALALAEELNRQYIAKVYEKDGLTQSYNSALQQYENTEKLIQQKESELANAELVIKQSEKNLSEGRAL

SEQ ID NO: 222 - protein, 221 aa, Phage F170/08
MKIYTLSRELNEGTIFVPTSSSNEGKLFSFPLGTLFDWYPCCPRYEYQYSTSRKKLYLRLLDSDKTLVARYGVGDNKKRVISKIACFNENEWYNEEVANENAELFNFAEQYDIVTPLKDDYTLKEVDDSISKVLDILDLLYTNQKVKVEEELINKVDTLQLSKPDSDELKQAYKDISEYMRLDREEKATYVLSRSLDSLNSVYEKFGNVYTMLNIMRKVVA

SEQ ID NO: 223 - protein, 255 aa, Phage F170/08
MFTDLLSNELGSPKYAVRDYRYNCPFCDYDTKYKFYVRVEEGHPKNNLWHCFKCGSSGNPVSFVMKYYNVSFKEALEILEEYGYRFNNKNYVPKSDKLTDEEYLLLLLGSLGKPKEETKQAKKELVAPPLPDGFKLLSQNLREPEAYPFLLYCNKRGFTLNDIYIHNIGYVKDSWVPLENGKSVRLKDHLVFLTHGKDGKYQYWNTRAIGQSFIKSLNAPSKEGEHSKKDTIFNINRASQTPQIVITEGVPDALT

SEQ ID NO: 224 - protein, 210 aa, Phage F170/08
MRYTLEDLHAGMKLRCTDSKNYSFWTTNKIYEVTKKESGSLCIFDDYGIESLDEDILVRLNGNTGNAEFEVVSKVMKDADYTEEDLEEGMLLHCKDGMSFPWWATGQTYEIYKGEKGILFTKSGDGNQYCAKEIVARLNGSASGSFELLERPHKTELEKKVEARIKELKEKKLCLFYKQQQIKIEENEISIEISKLSEALKAIDVLREFE

SEQ ID NO: 225 - protein, 255 aa, Phage F170/08
MGRVSVYFLNSRNIMDEDETKRTYHGTFNSMKEAEQSVRDWWKANDFKCGTLRIIEGTEDGIVRWDYGNHTGFYLFVPEGAVVKYTIREGAKKPKRGRENDVAHDLFTADDGVVIPGRLGSNVISTGIKTSFDPKQYGLFINPRGGMMKYPITLGNTQGVVEGEYRGEVGLPLKNTFSLQLDARAVSKNVLTINEEGKLINIPVTVARSMYPSFNALYEKQLEKLSEELQLVYGGEVRISNADEYVVAGTLFIPK

SEQ ID NO: 226 - protein, 76 aa, Phage F170/08
MLIPEFKPPLLYVMGSFSVMLEKHQCSVTFYLREPYLGTSYDKIVKLIKMTYPNYSLTYVGMADNKYKFTLKNKED

SEQ ID NO: 227 - protein, 102 aa, Phage F170/08
MYTKKEEVVTVKHLVDKEQIRVGDIVGYKKTIRGFDAKRVKDTLSVTNQIGVVSRVCDEYITVHDFFDKCSREIWAKTFENLEVRKIEDGNSLLRRYENEFR

SEQ ID NO: 228 - protein, 103 aa, Phage F170/08
MNFVDYFNQMQNLVIEEKTDEYVLLEKEHGQKYVTYQELEGALSTVARNTAFMVENYNLMQDINLKIVLKKLKDSGTITEELEKEILKEFKNIESLMEDETYE

SEQ ID NO: 229 - protein, 123 aa, Phage F170/08
MSKESKRNKRIGELSEADMRVWAEWLATGQVHDKNHQKQLERLSKRSVSLSDVTTIVEFMGKRNDGYISSLIEQQAVFDNLLTKLGVTEENRLEAKAEYEKELSLIQEKIQKELESIKENKEK

SEQ ID NO: 230 - protein, 222 aa, Phage F170/08
MTDYSAVGKKSRNKGGRFERQMAKELTEWWGYEFNRVPASGGLHWASSNNVAGDIVVPSDANFPFVIECKNREYWTIENLFLNNKEIKNWWAQVVGDAKETKNIPLLIFTRNRAKNFVTMAYNEKLVNEIEKRGYPLMVSNITYVDDYKDTHCYKTFTTVLDAITSFKPYGSKDKDYFLFYFPSDYNWEDSLVYETTIMDDAKQMDAEDSLDALVNSYLGGE

SEQ ID NO: 231 - protein, 99 aa, Phage F170/08
MAKTYQEALATVQSYLESDSVMKETSSISVSFSANWTGEREDYVIDTLTYDIDLRVFSLETAHVVAIGKKLPQDSNEHAELLKRLKKEFKQASKKLRED

SEQ ID NO: 232 - protein, 159 aa, Phage F170/08
MIDNVNSPSHYTQGEIEVIEVIEYITAKYPAEIRYHLGNVIKYICRAPFKGKLQEDLNKSSWYLKRAQLVLTWSPSSYTGKCKKFLENFLFKNSHIRDAQLIEIPEEPIIEKFLFQTAQSYNKEQQNYIISALMELNSSSGDVKTVLENTENYLKFITT

SEQ ID NO: 233 - protein, 255 aa, Phage F170/08
MTKAPRVKRLNIYNTDRYFNINLMKKEDIAKKIKVNRLNEEEIEREMDELASNPLKTPIGYMDRTNEKSYILYQEKYTNDRLIQKLFKHAGSVSYYTDTIVPYYIIEQISKNLTSEVIYPTKNSYENREIENVQLAFTACPVTIDCPVVLPDVSPYDVLFALHPLKTNVDKIQISFPCLTEEEFDTRHEEYYHKVGSHYEVKSEYKYKFFKYVQTSLSIWAMNIWLVCDSDEDYNKIDRYIQKEKIKRNANRERA

SEQ ID NO: 234 - protein, 103 aa, Phage F170/08
MSKDKTINRTDIARTISHHTGYRMKDILKILEVEDEVVAQAVSQGISVKNHKLWKLNIKKKPEKVAWDGINSKSFIQPEKYVVKFVPLSKLKESIDTYNKESK

SEQ ID NO: 235 - protein, 255 aa, Phage F170/08
LKILFLQEYIRENHVHNGKNGQTVDFKRTEMGKKLTGLLNTIGLTGRDYAVDYVYDMIPEVQKVNPRTGKPIKYKTPTLRQRKEPEERLLRRLMKYKPDIIIPMGEMGCKNLLGSTSITKNRGVPTKKTITNENILRTADEQGLEVDEVVDSFETWVLPMFSMEYWTANPNIENFIMADIDTLGKFVQEGEQAFIPKKVDYEFVDNIERVRQIFGFLDKTKPVTAWDLETNSLRGDLLGAKPLVMSMSWLEGQGV

SEQ ID NO: 236 - protein, 180 aa, Phage F170/08
VLNLRVDDLEFKTIKIIDDNGEVVTHDLQTELQVNEFNVRTAFLEQPAKYTYWTSILERLRMYQENYELKAEKKKAELYEPSRVALINQGVAKPTKDQIEAQIMLDEDYYKLRQSIVNLSFNVRQLQYIVKAFEQRKDMLIQYGADLRREYEYSQKVSMPDPMKNKVNNGFSDFQWNLEQ

SEQ ID NO: 237 - protein, 255 aa, Phage F170/08
MNFQEQLQQQLKQQNIGEREAVDYPSNHLKHKELYFPKAENGQPSTLYVRVLPPAVPGENYNVSAREAFLTTRNRNGKDLKSNFIFSEHPNAEDILEQAMIRWNAENRVPNPYSRNTKPRQRYYVNVVQLIINQQTGEVNYETDSNGQLMVRLLKLPQTACMAINESLSNPMLRPQFSPDVPEEVAQYSFISSADAFPISITKPPRSNKPTSYNVQVISNRSLGALPQGWENLLEDLKYQATPSVEYNREFIEYF

SEQ ID NO: 238 - protein, 255 aa, Phage F170/08
LARKRKSEEIDFGTIDLTKEVGLTTFTDTKFSNVSDRLPTMIPQLDYILGGGLPFGRMVEVFGKNSSGKSTLAVHLTKVAQMLDVPTVWIDVEGTADPERLAELGVDFSAGGVFMVEPKQNKDGSKDTITVERVAEELQRLLPVFSKLGKPVLIIWDSVAQTASEKELEKGVGNQQPGIKAKAMAQFAQIIAPLMTNSKALFIAINQARDELGSMFGGVDSPGGHALHHWASLRLEVVKASQIKNKELNAFGAEE

SEQ ID NO: 239 - protein, 128 aa, Phage F170/08
LRKGLAPNPFFEILEKHQDSSKRTMTMNSSGTPSSLQPIRDMFLKAMREGKRVLIENSDLSSANSVVIEIEYVGNRWCLGYQRVLFYGMELKIPHTIHFCDVYGAYGHDAQKVKRQVKVVFEGDNPFE

SEQ ID NO: 240 - protein, 204 aa, Phage F170/08
LSRDVQKEEKEIRNGNRFITETHGKGVFPRDVDRLYHKYSNLRYKVYNTHKDSFNSEASRKELKSYIDEQFIKLTKEYDINGEVDFPGYIKKALNLRVRHSYVKGRFRDTARERLGTQDNEVELLLGIDDSSQADIEDAELIESLLSKANFSEIELAVFQQLIQGTVRDARIITELSENYGVSKKAVKDAIKNVREFVLINLTD

SEQ ID NO: 241 - protein, 91 aa, Phage F170/08
VEQNNTGKYAPFIRLIVMGISFVATGLTTIFGWEPLPFTDEQMNQGLMLVLSVGLAIYNWYKNNAVTSYGKAKEEAGKEVVGTRQDFKNRD

SEQ ID NO: 242 - protein, 255 aa, Phage F170/08
MKIDEISKLELPNLFGKFLVVETISDGYTGTVSGHYNYEIDQKSEETYIYPVFWNDKLNKFIRSDELVVYTNKNKVYYVCKTTIDPYNHAVVDELTVEEGMDKDKRTLQAFKLFVNDLFSFGSYNIFLTGNLSLENNPDIVLVSSVSLDKQTAKMYTERTLELTATVLPEGATNKKVIFSVDKPELLGLTVSDNKATVTSKDKAGTAIVTVTTEDGEHTDKCTVQIEEYIKVTGINVSGESALEKGKTYKFTASI

SEQ ID NO: 243 - protein, 147 aa, Phage F170/08
MAKEILNIEDLLKPETLEVAIDGKYLIVPTLSDGFTGTVAGGYAYAVTKKGTDYTVNELIYNQKDNTFKPSDEPIIITDDNEIFFITRTLEDPYNYPVVATEKLKTKDVKEKQVLQAFLAFADDRFKLGVYNVFLADEPFVYGDKTE

SEQ ID NO: 244 - protein, 98 aa, Phage F170/08
MNDNKEKCVKQEIRDTYKGYDILLDEENGFFYVSVLDPDGKEIISGFVEADKPIEEYYKELLGKCDQDISFKDLLGFLNGRRDTERTDIRFLKRDSGV

SEQ ID NO: 245 - protein, 255 aa, Phage F170/08
MTKIKLITKKNTQGYVMNTLLRRFYKNNVDVEFLNKFNLPDIHNHIGEYDAVIIVGFPFFESQRGALDTALSSMDNPFSKVYHLATFGDTYRNEGSFRSFVDEVISPVGHFVELIIDLTKFTNTGTKEDEQNVVALAKEALVFAKDIIEETDNYNRYEVTDRTISWVLLVDLLGENLYKVTEPSKELDTILKEQEVLVDALNINMQDYVLRTIGKMSANVINGTVVCFGYAEQHVNEVAHKLINFYKSHNYQKVI

SEQ ID NO: 246 - protein, 255 aa, Phage F170/08
LKNNEPLEKLLDKLDEPRILQTIIIGSLQRSFNRVHVGKFNKLAQEFDLDKENLYSLKALVKEIEEDKELHELYEASMAGKITLEAVRKVLLQDDKSSFDVLSSYVVENQAVLARNREFGKLQREGAYLDHLISGLKTYLLAELKDMSSLKYINKNLKAPKVSSDRELILCLSDWHIGAFVNNIDTGGYNFEIFKERLEKLLEEVFQVAMEQDIKKIHVYHIGDIIEHINMRNVNQAFEAEFPATEQIAKGIRVL

SEQ ID NO: 247 - protein, 124 aa, Phage F170/08
MGGNLVYILLAIAYVGEGITAFTNTKRKERYMIEEGEAPLPRSSYVFLGINYLLRIAIAISLIFIIPTSLQLNVTGIALFTLMVFVVPFIARIIEVVIRTAIVRYVQKQYIKQLEERKGKRETN

SEQ ID NO: 248 - protein, 206 aa, Phage F170/08
MNFTEVISPNGETSLIDVNNPPTLIRRGVLSIKTKVNNEVKETPVYIVELAEELTGTDVVSVYKVKEIGDSIQKDYIEEKVTPRFKSTTYLGELAQKIKGRSIKEQRRVETKPPLFLAPVVNGIDTFTGIEGKGFYEREEDRHILLPDGKPGIAYGDNTGVFIGLSSIKWDKAYVDVESITKGYLSQKQIWFNLDGQRPQFRSETL

SEQ ID NO: 249 - protein, 246 aa, Phage F170/08
MTDKQFYEADIQELILNKQRIFGDIGKSAIVFEKAIMQGNTICDCLVFTEKRGLIGIEIKTERDSTKRLNKQLSDYEKVCDYVYVLCHDSHVPKVEQILTRHNHKHVGILAYTEFMGEAMLGEYKQPSRSPKKSAYHMLNILWKEDLIRMLGTFRRYGDRLEANGAKVMKTNSRSGGVSGLYVKSTTARRMTKPELINNLINRVGGTEEATRVFCDVFIHNRNHPEKAIKLRHFKAKENRGDLDGV

SEQ ID NO: 250 - protein, 168 aa, Phage F170/08
MGFKGAKYGSWNTVVGKNYVGTGGRTSGSNTKRLSTKGYYQVGFVKEYQNLTEKDIMLKLEYGKDLVSSYTGVPADMIKLRKKKEEQTLASLDTVYYVSIGKEPVGKLSIRAQRRFREVGLTFIYLEKNYVQRKLRGGNVRSVGYTNATKSQKRKADRRKSNKSKTTR

SEQ ID NO: 251 - protein, 255 aa, Phage F170/08
MLKKGKEVTLRKFYNIITDKESVLLGARYTSSIMTTDIPITTTFEDVEVDLKKETVAGTISFRPVGERQINALSLLKEASTAYGGYGEFLDDTIEKPLINSDFAVDVSLADSAFSNLQEIPFNLYMSSPKVFYTEVSIRGRKHMQYVLEDESSSGVTSTLALVFRKKLYDGETLLGVHTYTEALARVEGIKVLQFIANGSVLEQVIGAVSVLGGSTGTTLFPMFDDMVMQFVMIESVPWVHISCDTGAIAFKEED

SEQ ID NO: 252 - protein, 255 aa, Phage F170/08
MDYKEKVYVGALTWLGTLGERRYLGQMRDVLAVYELGSRYAGYYTENSDYDYMVVYMPSPHDLMYPTTIYKQETKIDGNKVEVKYMSIMEYVYRIENGDLEALQMLNATSSQSFFGEPIEGIDNKRTRLVTYMKELEYRRETFTYLAPEKLFRGVNGRIKATKARMDKAIENDDMEVAVKCAILIRYFMDLLVVLADGESIREGLTFSPIIANIIREFREDCESAQAKTLINTAQVLLEADREEILNSIKDHGLS

SEQ ID NO: 253 - protein, 255 aa, Phage F170/08
MTKLEQNKEILDIFNRKGKVTDKVEESAKIMLELDHDYDFGTGDIAYTERGTDKKGRFYLESRLFIHKLMPYGFILNAVVSKVHYGDQEETLEREVSRVYELEYNLRDKVAVLIKNGKPLNFSENNISNMFSGHVAQNILEQLDTMSGSDMYVSVYKRVSRVKDEQIGKVSRFFDRLMKYNKIELIYKSGVPEGFALAYAYRVVVVGEGKVRNKWYEPVKSVDYLDKEQTNPAKHLGIPKSIFKIICEGGLEWTF

SEQ ID NO: 254 - protein, 229 aa, Phage F170/08
MAKKEVNNSSVLLNLYNNKLLVSKVDEALDEGKPYDFIIAFCKEKFDFEINKPALSRYKEKRRESLETGVDLESLLDKRRKSGKIIDIKSKEVTPLPNETYDNTFGQVEQIYNDVEVLDTIIQKGFNSLKEVDYVEAPLAMKAIEVKAKITANQFQGLSLTGLRELRLRQSAKEQAMTEIILQFIPEEQHEEVFNAIESAEKEFYENLDLTEEDQRITKALQASGMDII

SEQ ID NO: 255 - protein, 155 aa, Phage F170/08
MVENLREVNYKTLTLEESLHALLEGKTLIVKGLEQRRKLDVLVRIFSEGVVPVTQISYDTTPADGYWRTGYWQIYDLPINALSTYPCFIYDDLNTDELPKFMIGDTVYYTSKEDSIKDSAIVISVYKDDANNKWYYKLSRDNEIYAESEIRRDRL

SEQ ID NO: 256 - protein, 255 aa, Phage F170/08
MANILDTLKWLDKGDKVTIEFDKERSKYAKLTLHDSSAKTNIVRNIVFYDLDKGVYAYTGEYTPVWDNLLDDMRKTQGAEPEIKTTKVNQLATYEDALKFIETNGTFYIIGEEVIVKVKDAKELALMLMYFRDAMEELRGEYDPKKHHVDMTIELSKDVLKKMAVPRHELDLSLGGLMRAVSHNVGEDLFETLGFDYMKQAWEVLVNCLSLDTIHEVPFRVLDELEKVTDSMSTTDHIVTLYAGRELKKFYSEEE

SEQ ID NO: 257 - protein, 68 aa, Phage F170/08
LILFIFSIITMLSMFLLYLFGMASVALIELGLLMGSQNDITKGAHSLLFTGVTLTVVTEITKQCLLLF

SEQ ID NO: 258 - protein, 150 aa, Phage F170/08
MYDSYGYLDWASWLFSIVIGSAVAAFFTLAVVGITFDVAPSHGVTKSHELHPIYENSKVVVEAKKEQFEINVDGGLVAIDAEGTTILSTKGEIKPKIVFTENYINNNWWTRFLGIAGKVKDTSSVLYLDSGTLVYNKPEKNSSAPDLKIK

SEQ ID NO: 259 - protein, 56 aa, Phage F170/08
MSYTKRALEARGYDFDTMSMLEKMNALLELLEEPEFQEQMRKEYEEFSKECATNGE

SEQ ID NO: 260 - protein, 90 aa, Phage F170/08
MENEKLESYFMKEIAPILDEIEMSEELIKGMENNNPSDMITVSFSKEEVDILLAMLDLELPRLDSGSELFSPNLVREAKLQLIKNKLTSK

SEQ ID NO: 261 - protein, 83 aa, Phage F170/08
MNEQKKVYAKLTEDEAVFACELGDKIKQIRESQELSRLELAKRAKVDHSTLILIEQGKRLPTLRIMMKLSKALHRELAISFTD

SEQ ID NO: 262 - protein, 95 aa, Phage F170/08
MRGSLDYYNYLYQTIENRPTEELDVLYDGLYKKAGDLFAIDNFQGVKEGRLILKILKAIREEINSRIDEEIDLYLYNIYDSISDEDKRVNWLYEV

SEQ ID NO: 263 - protein, 255 aa, Phage F170/08
MFSVVKADSYVKSDIEMYEFKNVKSLALTKKEKELWSGKIAKYVNEFIVNAYGDYHGNKIPEINVVINGKLKKVLGSFVQFTNTNIHYIEISGRFVKEVILLQETPLAQRALDILMDVARHEAIHYTLCYLNSLSGGDLPTFNYHDGGEDFEKDLCLTGTSPSGATKEEYIYSSFTLGAIRCRHHSTCPECGLETYMYTRGRYYCYNGCVGDNGRKIIFRPQGDIAIYIDEPKSKAKPKVEEALKDYKGALKLPY

SEQ ID NO: 264 - protein, 255 aa, Phage F170/08
MAYVTNIDVVADGLDLYNGNYVVERGQVVTFKLHVATWNNEPTPENAYAIIRNNGVDYKSKVDEFGNAEVTFPVNGRPDQVTTSIFALTSGYEGDMPRVMSAIFSDETEIKQTVMNVTASINGEPVSREGVFLERDQVVTVDVKATLSTGKFWEGAQVGVYNNNTEYLGDLDADGYGSVTFQVKGKQGMDTSAIYVFVKDHEREATLTVPVKFTNTTVTTETSTEESSTVDTTTGTEESSTTDTTTVESSTTDST

SEQ ID NO: 265 - protein, 100 aa, Phage F170/08
MSQVSKHGEKRVRERVGVNKSSVDRQFELALERGYRQKELTGRLKKWVVSRVFNSKYPQTCILYNGKCFIVSSEGTLVTVLNIPSNLLKDFAKLSKKRGK

SEQ ID NO: 266 - protein, 100 aa, Phage F170/08
MDIMDIEFLEEHKQLVKEHVEQELKLMHPLKKLQVMTDWLGDTEDKLSQGDLDYFNDLTETELIEAMDASEIVESYSDVLLDFIDYYNIDLTGLEEQLGV

SEQ ID NO: 267 - protein, 97 aa, Phage F170/08
MDKAEKVDNIVRQVTGAIIKTTAKVAFIVFVLTFAGILVGYYSYSFLTNAGWFALPMILSVDLLYVAVLLGGLAFIFAEVYKVVLEVKKIVKRGGQL

SEQ ID NO: 268 - protein, 59 aa, Phage F170/08
MSNKTLEQRVIDANKEINDKLNESSIIRKQIEELEEQEAILLSDVEDLLDYLENIGVDL

SEQ ID NO: 269 - protein, 121 aa, Phage F170/08
MNKKVEEMTMEEKDKALIAMGLIDVTQEADWVVLATCEECREEYEGEEYEEGDCAECEHCGGEYFMIETALEGTRCGRCDDYFDMWDDYFEFENEGNPYKDKHICEHCYEELVSMGMEEKF

SEQ ID NO: 270 - protein, 125 aa, Phage F170/08
MNELEELKNTLIRQKLSMLESYEMREASFWIMFNGILRTIMSVAVVAFVSYAKHVRPDNVATWFLALIWVIFLAEGAKGAYDAIAFGIHRKKFAKHIKNMRGIITITQLLIEEDEEKLNGGKLDE

SEQ ID NO: 271 - protein, 76 aa, Phage F170/08
MSKDEKLVEWFVVALMVIVWLLITFSILYTIVSLPFMVHEGDWLGIVRNVLLDIVVLVIGVVATWLQLRFKKGMEE

SEQ ID NO: 272 - protein, 124 aa, Phage F170/08
MGYLESAIEEIERVLLGNKSRDTEEVYLNNAIRYIKKELKKKEVEPTWLNEPQTLFLNWFNELYAVGGLTHVTEAVGFLESTGGRMKYPEAYSAFSNLSENELLEVYSKFYTGLFLKAQGGELE

SEQ ID NO: 273 - protein, 85 aa, Phage F170/08
MNFHGKVFHDKVFDILSRDYPDWQRYQTEKRPHPNELRKDFAIDSTDSRYEEYVMGEFNVETASGDVKVYAVGIRRVVHKRAEEE

SEQ ID NO: 274 - protein, 197 aa, Phage F170/08
VEYTEKDIKEGMKLRCTDNSNVGYWEVDKVYEVTRNKDLGLVIAGEGERSHRTVKYILEVLNGDSKIKFEVVEEKPVRFAKVTCVYPPDRGLVEVGHCYEVLKEFPTGSVRIYLNSKLGNHSLLPDQFVFVDEPSNDGEKDVEELDVEAKILADIEQLKTEAECLFAKRDRVNEQALNLNAKARKLEESLEVLREYM

SEQ ID NO: 275 - protein, 255 aa, Phage F170/08
MIYYINFLEDFASSWSADKRYRVRRIMTTGSYAIIDNYGHVRFSSDTARGVLKNIEQEYATNKVELTLVEEEAMNKPRFKVGERVKVSNDLQAFGIEYKTHIASKMLGYAGKEATITRVWGSNVRYFINIDGTHQDWCWTEDMLDKIEEEPTLSVRCVEAVHPFWTKGKDYEINLTSDGRYRVWDDEEDGSSGKSIKELLDVINSSGNKFELLDETPSEAEPRLNHDMSDLEKIEAKITALSEESYQLFEKSEEL

SEQ ID NO: 276 - protein, 100 aa, Phage F170/08
LNKKETLLNTTVTFLGGTSQSSRPKGKQTLCEMQKSDGSVEFIFDGTVFYVHSMVVVYMANKKHSMQATVSAIDGNYKYAGITFKLKVDYKENTLLLEEI

SEQ ID NO: 277 - protein, 209 aa, Phage F170/08
MRKNVICRLECVSKDKDNLGEWTVDNIYPVFESELGKVYILDDEGTTCSRDSVSLIISSMASFGVTFRVAKDKAEDPIPSNPQSSTSLEIVKGYEHLEEFIDSLSSNQRVVSHSVDPNSQWHYIIYETKSAELGGVTLEELLDTLVYNVHVVVMERSKRTYEPLESHTFKWEYGTKNTEDWEKIVPLLGYKVFNTNLNSNRGFHITILK

SEQ ID NO: 278 - protein, 52 aa, Phage F170/08
MYFVIVVNGQHRTLLKVTGKEWEMSPHTEEAVIEVALDTCYTYIENQEAQKN

SEQ ID NO: 279 - protein, 46 aa, Phage F170/08
MIGDFILWFKQAWKETFCIHDYTVKGVYKTLDNHGYLKCKKCGRIK

SEQ ID NO: 280 - protein, 110 aa, Phage F170/08
MNQRQIKKRMKKVLAILNEVEVVDSDYDSGMVLYVDVADNEQNRDIIKEVCGILGLDKEKFIAECKESRLYEETLNLASCWHYLMQKEPKKLTIWHSVSKGFSLERYSED

SEQ ID NO: 281 - protein, 213 aa, Phage F170/08
MFKKDKKEEKTYREGDLLKTVGGYYPDARLSLGITYPLYKTTNEGWYIINNEGSRVTLIEMDALGIDYAVMEEPLLELKEGDPLLVVSDLKRGVRGLAGAEVQCLNITGEMASLAGTVVHYDKDMSHIAKGLFTVKENDSYWCVAIAIPLNKVADPDFALEHLLATLNKKASTKRLILNEIKYDLNLLHQELDEVSNELEKLTKNIETIYNNR

SEQ ID NO: 282 - protein, 147 aa, Phage F170/08
MSMPSDLGKTLKKPIVINKNPDFYELAVGGKVIYNEEVMEIAKAFSNKKTKYYLLNTRSNKQVCVPVYHVRPYDTQVEGLKLGDVLDAMHIMTTVTLRAVNKHGFVVDEDIIECLVDDVPENALIVTSEVSRIQPEDFGKVTIDYFV

SEQ ID NO: 283 - protein, 143 aa, Phage F170/08
MSYVNEFETIGDWLDREIYDVLLRDGHDIDELDNWGMALFALSEGYVLTDGLDKPFLELTREDLVAGYNHFKEELNGWLRGGKLLEVSGNLATIQGFSFDHDDVLFLEDNNKAYAMLVGIIIEARDTYKNGFCKGYYVIPYQD

SEQ ID NO: 284 - protein, 99 aa, Phage F170/08
MNKYKFTYADIKNLSEEEKEKELKNRCGVLAVECLSTKQLQKKKPRFMVFLNTVIFDSTAETGGQYATATVKTEPIGDGRFRVCDGWGQLSNGIIELLK

SEQ ID NO: 285 - protein, 96 aa, Phage F170/08
MFKRLEEYRKNLSNEELKIFNNTMKLLNDNKTDFQERTKNFDKELQYTELENEKEKILIVLDTIRVSNENYKNVISENLYHSIKEMTIIFELLYNL

SEQ ID NO: 286 - protein, 107 aa, Phage F170/08
MNELEEVKEWNNKIEEQQEVLNKVIVTFYKEIDLKVKMVNRGLLGQLSAFNELKGMLSGIELTAKVIAPDNVLPITTHNFLEYLFLGDNEQRAYAKEYLDGFLKSVE

SEQ ID NO: 287 - protein, 46 aa, Phage F170/08
MMNGLKRLMKAKRYKKEVKEIITMQKKAINELETLNKNLKLINQNY

SEQ ID NO: 288 - protein, 88 aa, Phage F170/08
MTKEELKSYLENYNKPFSTSMDNVFSLFINDVRAVADDFRKGEAFIYTCAELIEEQAETLEKSDLEELEEKSGESLVIQDINGYLYFV

SEQ ID NO: 289 - protein, 75 aa, Phage F170/08
MIIAENELYLVKNPLNEWDMNYHLIEKETGKDFLIDIGDVADNEEEREKYELGLLFSDLKNLIVDLLIEYSWKTI

SEQ ID NO: 290 - protein, 97 aa, Phage F170/08
MTEQQFKKEHLLEPTEWRSGGYLDTSLIDQSQSYYIESRPRVYGGCYVYQYVTMKDGTVYELYSMTASTRGIVAHNCHARNVLQRDVKQYRDSAIHY

SEQ ID NO: 291 - protein, 68 aa, Phage F170/08
MKLSDIILVGLLVSIVLLWGYLSIMICLQVFRALGGWDIRTLTVCSGLLFAYVFGLKGIWEQGTGKSK

SEQ ID NO: 292 - protein, 80 aa, Phage F170/08
MKLNVIHLLFCLFQEQESYSILSYESIDEFYSRLGYDLESEWLLRDLGINGTSGLAELLTDYNNLLENEITKAVFSDKWL

SEQ ID NO: 293 - protein, 81 aa, Phage F170/08
MNELECIYDSRKSFYGKANLVEEENGISLYSYDTKVATIYTNGLAKVFGTYSQTTLRHIKEFFKQNGLKADTKKQIEKDYL

SEQ ID NO: 294 - protein, 76 aa, Phage F170/08
MLKITKEITLGEFEAWEGGKDRLETIKELDILDEAQQEIELMIEGAEEVTEMTINDILWFEMDEFIAQFEEEEEEE

SEQ ID NO: 295 - protein, 68 aa, Phage F170/08
MTTEEKALNIAENKGITDYKVKGNVLSYYTSYPMEKCTYLVTIDIETLEEERKELKKYYKKGLQNACL

SEQ ID NO: 296 - protein, 56 aa, Phage F170/08
VAVTINNRIKKLQYERIRKLEKRKRGEPPEFIFNGNYSLEEIELFLHFRKKSEGKK

SEQ ID NO: 297 - protein, 98 aa, Phage F170/08
MTKTELQYKKAIGVAIFATSEEDKKQLGNVAPFSIYEILEIDLNKNRVYYALNCGERHAVCFTKLRKEEETGDNFILINKQPFFLKDIHKGLTWSKSL

SEQ ID NO: 298 - protein, 76 aa, Phage F170/08
MKIGKKEELEANNIFNRADELLGAVTMEELERDNGGSIFYADGSPDTVLWHMKKEFSLKPFHCYYFDGWYIALINI

SEQ ID NO: 299 - protein, 144 aa, Phage F170/08
MTKENNVFLNEKELMKEIIETLENGFDGCYCDLHNEVFNYGTNTDTEELEEYGIFNAIGEIQEYEEEHFGATLTDLGNASAVADMLYYIKGHEFLFDRLDFNDVLADVAEGLKLDKDLWNEEATEEVNKAIIKCLKREVPWLVD

SEQ ID NO: 300 - protein, 143 aa, Phage F170/08
METLENFGYTWQGIKEVTKEEAEKNVKNGVDTFLLYPDNTESLVISLDELETEGVRFGVEKPVQLLFKVSNSYHNTEEVYYGENVEEIEKKLHDSLEITAENLTGQEIEEDWENYYKTYEEAWEATYNGILSQLKSECTIEKM

SEQ ID NO: 301 - protein, 65 aa, Phage F170/08
MKLTEKELNTILRDDETGNGGTAFLGETLADFLEESGIDFTNLTILEVNELLENNGIRPIEVVPC

SEQ ID NO: 302 - protein, 65 aa, Phage F170/08
MLKNIKKSDKLTRKDIQGFWGDEAKTLEEWYKSISKESDTDKMINTLKEYANNNEFHFVKGEQGQ

SEQ ID NO: 303 - protein, 101 aa, Phage F170/08
MTNTNNQQWNQKFNDGTMNQNNQQKEVITLQVAESFVSQILTKEYSVIGLVILMFYFMFGMFGIFGGAIYIAFTHTNRKIGAWQQVRSVYTIKEEQEEWNN

SEQ ID NO: 304 - protein, 63 aa, Phage F170/08
MEQLKGLTIRELIKKLEEVPEENKDLPIYTFENENSLPIKGISLYDENGKHSQENPLSFDVIR

SEQ ID NO: 305 - protein, 119 aa, Phage F170/08
MNSFMNKQAKQVERSKEIKLVEEVRRENVKKRFSEEVKKYLEKGYTIRLENKVFPFALISIDLEKGEKVISLILVNEYDGIANYTVMKKVTLREKGNRAILKRMLTDKDVKVVSMWKGI

SEQ ID NO: 306 - protein, 88 aa, Phage F170/08
MKLKEFIKLAESKGATLEAYNELGGYELTRGDIVDQNPVLIAYMQGTHSVEISNEELENKELTELAFVYKNASFIYPNEKELLSGLGL

SEQ ID NO: 307 - protein, 55 aa, Phage F170/08
MLEVGKFVRGNNGARTWVGQIVGIDRLAGEYRVRDVVTGIYFYVSCSAVYECARP

SEQ ID NO: 308 - protein, 58 aa, Phage F170/08
VDTVTDIIDVLGIIKQDIEYKGERIKELEGQGKQEQAELLEAEVKGMREVVQDIEQAL

SEQ ID NO: 309 - protein, 58 aa, Phage F170/08
MNNNKLDELLEEEYSTLDELLDSKEFKKQMNNLNHVPQMQPQSHNSNTLADTGRYPEK

SEQ ID NO: 310 - protein, 44 aa, Phage F170/08
MTIEQINAEVKQQEMLGNKLEVIQLGNDIYMYINGEPYKTIELI

SEQ ID NO: 311 - protein, 52 aa, Phage F170/08
MTIEQVKDYGKAYGKELSTKEVKEFFEKHNDMPSLMDLAKFCGAMNEDGTKN

SEQ ID NO: 312 - protein, 79 aa, Phage F170/08
MTPELAEMNLTKNDSPFSFINESGVFIEPIKNPFSCEGTYLQACKDVAGELETNKEVGNEIDNYLKMQNWLNKLAYEYI

SEQ ID NO: 313 - protein, 74 aa, Phage F170/08
MKSIIIKQIKDGYKGILERRNNGWADEELNSYTTGVSNTLFELINDLQDNGVISEEEAEEIEEVFSNTIDILNF

SEQ ID NO: 314 - protein, 231 aa, Phage F170/08
MTEWANMNKEEVLELLNDWFGVSDYDTVMGELEEMKKVTFTGSTNQPLLGGNNDLIGLPQFFKDNEAESELPTYEELLEELEKDTWNLEAEDNTYNYSGFLESESDFKVIQAENSDTTIAFFAIHTGIDIRAGYSKAIPVIFETYYDFQEFLGNYFYSQGYYAFKHDNKEYTISLDVSATSEYVRIYITDNNNNELQLDYEQETCMELDKESVAEYLTSQGIEFKDLKPAL

SEQ ID NO: 315 - protein, 64 aa, Phage F170/08
MSRKYRGFDTAFTKDGVCVYVIKDDKEKGTALVRDTRGGDEYTVSNEGMIYTKDMESIDVYMPW

SEQ ID NO: 316 - protein, 49 aa, Phage F170/08
MEINKAYERLLKEVELLQNDLMDIEDYSEEVYQAFQKVIDELEYVIEEG

SEQ ID NO: 317 - protein, 75 aa, Phage F170/08
MLNSRGEPLLPINTQVRLNNFTFECNGRGRSPMGRVIGYDNSVCKEFTDYYIVESGDLQGYAHYTNVTEVVLGGT

SEQ ID NO: 318 - protein, 90 aa, Phage F170/08
MLNIFYNVWGGFISHPVLITLSIVGIYVLGYALVKFIVGIVVLSNSLNTKWVIASAIFTTVLSIVFTIYSFLVEIYVVLVVISGLVVLLT

SEQ ID NO: 319 - protein, 106 aa, Phage F170/08
METTLIDKERLNKLKVGDTIFTKPELRDPILGCDKATVTSVTPGSVWISLNGTEYEVHKDEKTKVPLYRNQSGEIVGEYFLDFADFHKYWTYFAKTMVEQVSLRGE

SEQ ID NO: 320 - protein, 103 aa, Phage F170/08
MDKNTKDELANALGKFFGTLVLVVLTLVIGGYVTMFLWNGLIAPTFGVLTLTWAQAIGLDVFISFITAKTTTNTEDSILMVFAKATVSTLLFMLIGWVVMFFI

SEQ ID NO: 321 - protein, 87 aa, Phage F170/08
MKYLIYATLVVYGLITLLTSYILTYGVYWQLTNELSNPMPWFVIVLCGGIVLVLITAFIILVVNVIQLNKIENQEVNIAIIKEENDG

SEQ ID NO: 322 - protein, 101 aa, Phage F170/08
MAQCYHDQLTREEEKQLKRKYEVLQSGSCWHCNKPLWMYPPDRVVNLTTQLDLSIPNEYTVPTRLHYNPITGERMGLVHVRCDYYLKELNNSLLNHSMEGK

SEQ ID NO: 323 - protein, 63 aa, Phage F170/08
MKLKDLIKLMKPGVDVLVTYPTAGATITVRTKIGSNNEVLEPYLDYEIANVSKTNHYIAIDII

SEQ ID NO: 324 - protein, 74 aa, Phage F170/08
MKVEQGELAITLPQNPEENATATIYFSVDDYGDIAITTTGEEGYTQFDFNFTEEQWAVIVDTISVQLRAQKLSS

SEQ ID NO: 325 - protein, 83 aa, Phage F170/08
MEKPYVAVRSIHTGRVEYCTEDWLFCGSERNAMPCKEIRYVDMLHCGMESYYEVTFKANQYTYTEELPVYAFTGIKMIEKEES

SEQ ID NO: 326 - protein, 126 aa, Phage F170/08
MAKKVEIPSFVARAIKKYDSMLSLLANEYFDPYDEAPDDKLAEWIDEGNQYVLARAYMYGYTIKRQFKVIGDTRYDHGFTIGDTVYLEKVYPDGVYAVRGNSRHSLKIVTLDVHPCDLEEITQEEE

SEQ ID NO: 327 - protein, 65 aa, Phage F170/08
MGHLPDDVGSWATHCINLVCDGELLEDKKSQTYTCEDCGEVVTLDELNEHLEKEAESYLKFFGYK

SEQ ID NO: 328 - protein, 171 aa, Phage F170/08
MDKNEFINLLGDEIFTQVGCDGTLNPHALGYNAGIAKAVSLAYGLDEPEKVVIPYKVGEYIDKCKEENLTFINMIDKGSYPSKMYFWLANNPENHEKLAKAWVLGHTVEEEEDEYYIIIAKDKDGWGYSYIDRLGSPDFTNYLKDIPTFTEKEIRKMDERFMAFAVKVGDV

SEQ ID NO: 329 - protein, 82 aa, Phage F170/08
MSYEITYDSNTSVNIQEKIIAVNNSALYKVCVEKKASRVNEKTEVKYTLEVSSAESQESTKLELPHEVMLRLSELIENSLEF

SEQ ID NO: 330 - protein, 180 aa, Phage F170/08
MNKQELINALEELKFSHVPVVQELSNRSQCYNEAIKAAILLAKKLDEPKKVIVPKFVAEWYEGNKHALDLAIFTQIRMLDGNSYPHESEFDCWLDQSKNNPIETLIRMKDGYEVEKEPLYHIVFTGLGNKGEDCYLWVDKSHNNEVYFSNKPNMGKNKFTEQEIKEIDERYWAFAVPVYK

SEQ ID NO: 331 - protein, 130 aa, Phage F170/08
MIKFKEFDVGDIHYEEQLEKFQNEHPSAEFVTITGGQTTYEKIWFKYTDDKVAQVELSDNQQIVLGWLKEKYTLTDIEPIELFWRLRANSIKPDYRNSPVYKNYRYMTEIAQLQVLQAFSQWAIERKERN

SEQ ID NO: 332 - protein, 118 aa, Phage F170/08
MSRQRYNEIIDRVCYMYMEANGEINFPNSFEGDLLKIAYKTAVEAVKKPELNKNQKQVFEWLKVGYCSKDSLFEALERIGETYEDPKTEEAYYSLSVTEEAQVIQAFTDWFLEQEGVQ

SEQ ID NO: 333 - protein, 56 aa, Phage F170/08
MRKINVYIETTWAGIGEIETVEVPDNATNEEIDEVARDVFSSYCSFGWGDVEDEEE

SEQ ID NO: 334 - protein, 180 aa, Phage F170/08
MDNKFATKDDRYLVQVIVNGEVKVSKTINGLAQAKAEKERLTKHNRRNLVIDSEEYRDQQNNLYGSRGGRHTVISINLQKLNHQVEGNELNTIIFDLVSKLEVTHNLKIAPTYFKAVKEGRKLFEIRKNDRHYHVGDILLLNEYTCGSYTGEFVKAKVTYITDYAQKDDYVVLGIKLCEK

SEQ ID NO: 335 - protein, 154 aa, Phage F170/08
MKYTCIKPFKTERVSVDVNSVWYGVDVNNMWYELDDPCYPDIKCPKYILIGGSAGASICIDLHTLLNNFMKVDNSYESVEIKLRERGIFGKEHTITFDYMGYAHFKQRFLKRFGNISSDRKLKKEIVNTNSLNDLERVFSNNDNWSIKIMKERY

SEQ ID NO: 336 - protein, 156 aa, Phage F170/08
MVINRYILCIKSLSMEDMRYVVEKVSSKTDFGGLSEDCLLPQLYRPITLVFVPSKKYVYQSLGVTTYKDEKALVYSYGTDGDGLDQLLKDIEEAKKVTTFEEGLKRRYNRQIKRKTKRINNLLEQDKRGYGWHELGYLQGVVTTLEDVLDDLEERQ

SEQ ID NO: 337 - protein, 121 aa, Phage F170/08
MSNCIEELLSKEAIYVDRFIVARDNSYFANIVMQSFHTKNVFHVKRNDEYFMGIRANNFVVELGELDFEVPISKEDHELLASVLGTKLDTATFVLVTGNHKGVRYTTIWAIPKTILDKELL

SEQ ID NO: 338 - protein, 59 aa, Phage F170/08
MIECLMCQVPLEETCGDFYLDEMLCGLCAMHLLLDGIEQSLMMEIYVSELLLEEEENML

SEQ ID NO: 339 - protein, 172 aa, Phage F170/08
MSKYILFWGHTPSKRNKLGKECLSQWYPSQFSAPIKGLGEDIIFPTAEHYMMVRKAMLFNDVDTAKRILKTESPKDAKRLGRQVKNFEENLWVKHRKSIVLDGNTYKFTQNDSLRNFMLSIPKGTKFAEASPFDKVWGIGLRESDPRSRDTSKWEGLNILGEVLTEVRENLN

SEQ ID NO: 340 - protein, 157 aa, Phage F170/08
MIKVKVIDSDTPYGLSKELEKFLANHKHTSINYSVAYKNPSTIYSALVTYKQEDVSVDSLVPLKAKGFLKIISFDKYRTLEECHRRVPLSTYKLNLNDGDKIPLFFKDKPVIAISPTGEEPYYFYEHPEHIEANGGLPSPHFAFEHKGNYYEYWEEH

SEQ ID NO: 341 - protein, 235 aa, Phage F170/08
MCFGYICPVCETAIVGDPDNGGELCQLTHIRHSKVIGTTRGHYNGLGGVVEDCYFGGRSGRNSQEEIFRSEYEFKDSYRIGKRRQAPSGREVRAYEPLNDLTVGSPERECFEIAIEGLNKELKGYANTILALEDELLQSAIGGLSCMGQDYYEKMMILANMKSSSNRYWLVLSKLYNDYILTLPDSMEAKSGVIAVHVACLKTLSKEERASLPFSKPDPDQSIGTVREAYREDNT

SEQ ID NO: 342 - protein, 146 aa, Phage F170/08
VEFVEKAEYVFPKPILDFNLGHRVAIVLKEEELSCLERSYYKTRLYGSIYLVASDKISIEVYNESIKLGFNDEEVLGCVIGYPVECAKWFAKASREELSNSGVMMSGSYTFKCPEHLVDYAKEYMLEHYGLKAYYDIPCEKIVTFS

SEQ ID NO: 343 - protein, 44 aa, Phage F170/08
LNKQRENHKEKIKEHTEIIGHIEEKIENILYIPEEEEYNRDLPF

SEQ ID NO: 344 - protein, 31 aa, Phage F770/05
GILLVDSQQALECCALSSQWGSGNNGIHHQA

SEQ ID NO: 345 - protein, 142 aa, Phage F770/05
MQVDVPGKERISALSVRGTVLILDGQEHDFAPIWDGGYLPPEAYIGRTPFQEIKVVDGDVFVRYIHQVTVEILDAEPGEVKPFKVTEDGPVEMPFEYYRLGLGTNSERSGDGEVPGSTEYGQEPSGESLPGGERADSDRIGS

SEQ ID NO: 346 - protein, 30 aa, Phage F770/05
MDKGEVADLTAWLEKVKEIQERYPLPEEPK

SEQ ID NO: 347 - protein, 174 aa, Phage F770/05
MTADQVFNQVLPEAYKLLPASMNSPEASVMLLAIGLQESRFASRRQLVNSINSEGRKVLLPLGPAKGYWQMEKGGAVKGLLNFWKPATKELVHSVCKARGVPATQDAVWDALEHDDVLACALARILLYTDPHRLPPIKAQAEAWDLYLRQWRPGQPHEATWPELYRKAVRVVTQ

SEQ ID NO: 348 - protein, 170 aa, Phage F770/05
MTISARQIRWIAEVLLFAIIALYAYNKGFVKAESKTNAEWELRMMQAERAAEENKKALEQSLLEAMNEVKKDADEQLADQASRIAAADAQSRSLREQVARLRDDLIADGARASTERHASNAASVVLADLYGSCVSHRQELAGALDRSHAAGLTCQKSYAIVKSLGHAPPQ

SEQ ID NO: 349 - protein, 185 aa, Phage F770/05
MSKYEPVFDSSKVTRFYHVRGFAERNGRQVRFFKTTWVGFLETDRAYWVVDEDDLKELEHVVRIRKITAASDIRDLAKERYGAFLALKDGSTKRARTSVKAAFFSMICRRERQLTFLERDLNRAQSILLGTRLDTKVAERLEMLNTTTVEIPSSWDIDQQILAEHKRIHENEGHEEGALVWEPDF

SEQ ID NO: 350 - protein, 63 aa, Phage F770/05
MAEVITTVLEMPNTVIATAVGDKIMEADAYRHYLESINVDPRFVLEEYIAMVAEKDQEVWKHV

SEQ ID NO: 351 - protein, 105 aa, Phage F770/05
MPWKSDPNIWGVLSAIALSVLSGVISLTSRIAKGHPPKFVWVVSELSSAILVGYLIYDVYPVIQHLLYEWMTMPICIAVGGHLGGRVFQWVEFKYKEKFGIPDSY

SEQ ID NO: 352 - protein, 74 aa, Phage F770/05
MNYYLLYLALGAAWFFVAIGHIFRVPSKQTVERIITPPILISLSFFSTFMFYVFLWPLALLIDIWRRMIKKSTT

SEQ ID NO: 353 - protein, 255 aa, Phage F770/05
MSNKVTVVGAVLDERYLTLYVKGSAEQIRIPQGDPRVAVFVDKYVPILSQGGEVDYSEDLLVINNVYEAAEKKSGGIMRFFRVAKKKVAEFFSAASASEPAAPVAPVTAGAVPGDCAPDTDAGQDVGEEVAEKVTIKDPALAKAVDEILAHAVPASAPQFSSVDLENLSEDGVESEDPDDDVGEGDTIIAVTDQGTIVPDAQKLKTQLTAAVQSKAKGSTVGIENFLRRAGSVAAKRQHSVQDLMRFIERGDLPI

SEQ ID NO: 354 - protein, 255 aa, Phage F770/05
MQVTHQKDYATHVVIGGKQAISMGISDDPAFFQVLSSSLYTDKILAVVRETLCNAYDAHKMVGIEKETPVEITLKDDEFVIRDFGPGIHPDDVGTIYGVYGGSTKKHDGSQTGGFGLGCKSPFAYVDNFQVTIHHEGKTNVYRMQKASIQNGGRPAITPVVTDIPTDQTGLEVRINIKNEDVRRFGTLIRRIVANAEMLANFNGVKLPTLPFSQVTEDWSIATEQVLEYNGHIICVRYGDVIYPVERDEFIAEVY

SEQ ID NO: 355 - protein, 63 aa, Phage F770/05
MSLDGQTVAVHIVMFTNYFGYVPGKKQIDHLCGQRLCCNPAHLEMVTHLTNQKRRAKRAKSKE

SEQ ID NO: 356 - protein, 132 aa, Phage F770/05
MAKKAKLKADWTPGKLGHAPVNGRYFFVNRETRMTHTWTIGQLPVPEGYEQVTMQEYDSFRKFNGTLSKKKLMAFIRGEAKCSKDAGKKSGSESKPAAKSKTRASSSTTSPAPATSGKARIQVRAGVVVTGG

SEQ ID NO: 357 - protein, 46 aa, Phage F770/05
MIKHFGGIEEAEAAIASGKAVYGKPTVPKGYILGTDIKGMYVLHKE

SEQ ID NO: 358 - protein, 189 aa, Phage F770/05
MNAAAFGLPATLREVSTVLKAPDPRSMKYRRLYMSIATNAAKQSVAERHQVGGVLVTTTGALFTGWNGTMPGTDNCCENGEYLREETRFKTTPYGVIHAEHNILAWASRSGVPLDNSVLWITRAPCVRCAEMIATHGVHLVLFRDDHDEPEGMTVLAMGNVKAMSWSTLDSLITEHGGHYVVSKTLLAN

SEQ ID NO: 359 - protein, 255 aa, Phage F770/05
MKYITWEEQDSYPVAILIKEAAVSRSAAESTYIKQLEGLGVPRKNVIVISLDYEGKKVSAKAIKECIKDRDQLLRDLGVQYAYVADSKYFKEWTKRKTDADFGNLSPPAGYDPGYLVTPGVNHQVLLFDPGQMHRLSRGFKAIVDHAHGVYRPVGSDLLHDVTYIYRGHVSQAKEALARLMDKPEISCDIEGFSLSMFDSGIATIGFAWNEHDAVQIQCDYREMIQDENKHHGYYEPNAEMREVLKWFFTEYPGR

SEQ ID NO: 360 - protein, 175 aa, Phage F770/05
MQARTPEFLIFKRAVKDCLDGFLYVPVRKAFQAKLNELIIADAVARGDGIRAFCHRGRNFMIPGEKPNFRYFPRLSRGNRVLVDSLLSEYDPVLIDERDSVLTFISQVLNKSDEPSEYLKMFPSGLREPLKRVYEHFGLPVEGVEFPTESPIGSNQAGWDKLCTRVGINLVLGGL

SEQ ID NO: 361 - protein, 255 aa, Phage F770/05
MVDSPVQQEIELESPVRASDHVRSEGVDKPAPFVLTPGQEAGFQTFINFYSNPDAQVMVLKGWSGTGKSTLIRRILDEMETLDRALSTLDDNFEPFEPLLTATTNQACEALAVAMKEFNHEVKTIHRALGLRLRTDYKTGKSELMPISRFELPYRCLIVVDEASYIDPALLQFCFDRTDCCKFIFVGDDCQLTPVGTNIMPAFAMKDIVVELIEVKRQNSGPLLDLCNAFRHTVKTGEWPKIQLDGDQLIHVPRD

SEQ ID NO: 362 - protein, 255 aa, Phage F770/05
MTDRSAEDIALSKAKIRIIGDSKVSFYANIMMGLKYVWEEGMGTAAIDGITMFIDPKFFMSLDEMSRKTVILHEIEHVWRHHIGKVRMGDRDPMLYNIAGDHVINNNLLACGYGPISWTDYRTGAKCNWVCDPKYANMSTEDVYADLYQEQQTQGGGGLSSSTQGNSGSGNPVPFDDISRPAPAKDDGTPMSETEIQGAINDLILSAATAARANGNPGSIPGEVQVFIDSLMFPKLPLPHLLRQFFQVVKRGGFT

SEQ ID NO: 363 - protein, 172 aa, Phage F770/05
VSGRWELFMVRQEDLTGQAIVDEYANSDSPNRLLTGDFEGWRVSIYEKGIQKGIKFGTKSVLEKLASEFCPYVVTVKPPDGSYVTPGLYVGHCRNSESQYNQSYSRLGGTAASINEVVELIRITNPLNGHWIFDEEEVFVAQSLAVPSLIPETHNQVEWCKFAKAMAIIGGE

SEQ ID NO: 364 - protein, 255 aa, Phage F770/05
MHFPQEQEVSIFDAKFIAESFLRAGLKPMIHGSPGIGKSAVARQIAKENNLKLIDLRLTQMDPADLNGLPNLSGERAKFQVFEQFPLVGDELPVNPETKEPFAGWLLFLDELTSADDDRQAAAYKLILDRQIGNEDLHPKCLVMGAGNLETDGAIVNPMSSALISRLHHIVVRNDLKRWLQVVAPKLDIATKVQAFLEFSPRAFYTFDPQNSGRVYACPRTWEDFSKWFLKMSPEQDPRALDDMLNLAAAMGIIG

SEQ ID NO: 365 - protein, 75 aa, Phage F770/05
MSKLQDLPVLIDRPGNYVTRDGSRVVIFTVTERPEGYSMLTFDARGSYTRVNNTAKPECWHVSGRLHAFREHRKT

SEQ ID NO: 366 - protein, 255 aa, Phage F770/05
VSQANEKTIERIGKILLIFKASEGEIRPHFWLTGPSGSGKSFNIMDQCNRLDIMLPMTEVNCASLTKEGYSGLSLSKALAPLATLGNVPNVVFCDEMDKLFLSGNSNDSHANEISIGVQNEFLRVLEGSTTQTFGDYGKYNTVCVERSLFIFAGAFNGQENMDATELLKCGVKTEFIGRTGLVYNLEKPTLEAMVQYLKESELWANYRSLFPKEDHKKAEKWLIKEIGRQYPDSNIGVRLINTLIHQYYINAGED

SEQ ID NO: 367 - protein, 61 aa, Phage F770/05
MQFSDLSPVEQKLYPTHSSLKEALEEARHLLPGGSHHDFMRAMMGYHNTFLLFVGEWTPSE

SEQ ID NO: 368 - protein, 77 aa, Phage F770/05
MSGDAIAMIVAYFATAIVAAGLFDFVLYDDYDDKADRSVTLGILWPIALPIVFGLTVTKIIKTAWKGFKDLCKYGIK

SEQ ID NO: 369 - protein, 147 aa, Phage F770/05
MLSEERIEHELSSLKNVLDGLRRKITVLHNKRSILSEEIDTTERHVQSYVKRLEELDKEFFELRQNQTIVHPDVQGQGQDEQTTAVLKDAVVTQMGNKLAEVLDALGFGKEHVQKHGLDETVYDACLYVQSLKGGEALLNNLRSMLK

SEQ ID NO: 370 - protein, 192 aa, Phage F770/05
MEKITWFQRGNPIDVPIDRCLYFLADGKLVQFAYHNDLGQLQIAFMTGISVGKLYAALKGKFVYVRHGFIVANQRVGIKVGRSSHNIPIAVYVKGQEHLCVQLTAGAKELVKAQFTGDHVLWSTKIKPGDTLVMLPGEPGERVRKKVVIEEIGTETHYNWCGHACFEIAVIDKHGYRYTELNDHFQLYGVNK

SEQ ID NO: 371 - protein, 137 aa, Phage F770/05
MSLRQVLAGTEQEVRIVALLEVGVLPHDGMNQGVHGQFSIATALLANLVLEPLDFLHGFGELLLQASIHRLEDCLFRDDLGSSFRLHGERLGEFGDLLVACFDGRLQLADLGLQAIIIALSTRVDPTVVLGFRECCV

SEQ ID NO: 372 - protein, 191 aa, Phage F770/05
MHTFEPGDPMTVIHDSFEHIDSTEGLEAELRAFGAMWWLRGETSWWSRFRQAEERPEHVMYYDIANFIMENDFLIDNVGKRFKLGDEEEEFLEMLRKLVEEAMERDSQYRNKPVARSVLHQASVLAMDWVRVGYRAARRKYPDNFAVADLMYYLYERVRYISHDAYEGSTLQLKYTLNGKYVQVYLDGELR

SEQ ID NO: 373 - protein, 74 aa, Phage F770/05
MRKSYLKFLDTMAWIVAVLVFVVVAVASLTVYNGLVALFVMLGAAVGIGMTFGFWFLGYGIYEELQKLNARVRA

SEQ ID NO: 374 - protein, 255 aa, Phage F770/05
MTPYTAFEYLLIDAANQMGHDKWLFEQRIQWCYDNFDDLENLECNEKTRPQYLKAVMAIRAAQRGEPVGHLVGLDACCSGMQIMSALGGCESGAQATNLINTGFRQDAYSLVTTAASTHLGESVGEIKRSDIKTATMTHFYGSKAEPKNLFGEDTPELEAFYQGVEMVAPIANEMRDDLINTWQPYAMKHSWVLPDNFHSIVKSVDVFETRVEVDEMEGASFEYIYKQDCGVERAVKNAANVIHSIDAYVLRSMH

SEQ ID NO: 375 - protein, 90 aa, Phage F770/05
MNVAAWLHNGEWHLFTDEMNRVVSDQAYYQAGLKGPDKRDLVLLRMTAKRRNTAYWFHFRKDNPFNKYMPVAYTEEIPKELQALLTIYGL

SEQ ID NO: 376 - protein, 94 aa, Phage F770/05
MELVVWKDGDNWRVFADDAVPALDGTVDRVAEGLATLYRKEKEPVVFTRRKTAFYDGQYWLMWKYYPTYGRAYGKEASDEMIKEPSAIALLAGY

SEQ ID NO: 377 - protein, 86 aa, Phage F770/05
VSHYAFYKEDDTWKFVKYGGLLELVQAASMMAYSPKEAAACTCYKLNGVRWWWMGMTDKDAIEDVNLLPADLRAMLVIWSLDQLLE

SEQ ID NO: 378 - protein, 255 aa, Phage F770/05
MTITHMLPEDMQRANEYRFARAHIDGYIREFIRGDEDLPALMERGIALLEEYRTTEYSYNSKNLRMETVRNLDLEHIVFEIIVASAYCQVPDMFISFTAKLAGVLGFDDKADSIKTIAEMVAVLAELDVYDIEQVYKYGTYKVISNIQLPEKLQHAVERAMYLPPMVCKPSKLTGNKSKLHLTLEKESLILNNNHHNEDICLDVLDKMNAVELCLNTEFLSTVEEESHKYLDTQDKKDDWYRFVSESHEMYKLMV

SEQ ID NO: 379 - protein, 115 aa, Phage F770/05
MRINAHNKDMFTMVGIREAEQNMARKFNTMLISDSLRKGESCLYIFDGLTEEVFRKDLSNVASGLMMSRLKSYTDPFKKLYTKHNGRWFVFSSDFNPVAEKLVPPEIRAQSLLFD

SEQ ID NO: 380 - protein, 146 aa, Phage F770/05
MPQFVVGNMWEAFDKADHFIVLSNSTLTSTGAVVMTAGMAAELVARFHDAGIQTSVGQYIAENGGAGGIFGCRCQSKVGVFQDKRHYRDPTDLGCVSTSTTQLMWRAQENPTHQYHLEQPGQNEPWWLIKDILARLPGNVTIWSRP

SEQ ID NO: 381 - protein, 83 aa, Phage F770/05
MTRTYLKRVVIRDDNGMFVSDGDTLIDALREVKLKNLLKQLTVIDQDDGHRWMFQYSHVNNHIVLTKQSPDCCDGIIRMGDLL

SEQ ID NO: 382 - protein, 133 aa, Phage F770/05
METNHMIFVFGSNTAGIHGAGAALYARNNKGAEMGVGEGPTGMSYALPTKYRAHGGRLVTCHISDVAKAVQRFMDFAKEHSYMSFQVTRIGCGLAGFHDSDIAPLFQAAPDNCYFSEAWKPWLKPTTKYWGNE

SEQ ID NO: 383 - protein, 97 aa, Phage F770/05
MPTDLKTPTGGTVTGRLVVDRDYLNKLLEVRKYSDRKIDMVYIDMTALEERVMAHMLDQIPKPVKKSKRRPKWEMPVRNHETNHLGKGPRNKFGGFN

SEQ ID NO: 384 - protein, 96 aa, Phage F770/05
MALKKSNARTNTAAQSDDTRAASFINISIGTRGGDPVRLGNGIPLRLSEAVEAQLHEYLAEAKDDKDLAKRIENLRSRLILSFRVVRDKSELQLDL

SEQ ID NO: 385 - protein, 61 aa, Phage F770/05
MIVLITRKATSILDRGYRECLDAESVARELHAIGMSAVTEEDVLNHWADWDNDLSDEPRWV

SEQ ID NO: 386 - protein, 73 aa, Phage F770/05
VTDVEILNLLCLYIASSVAVLNGYMKWSSNNYTMQQTWMGLVIDILVMHVLTFSGMFALIGAVCIFFNLVGLL

SEQ ID NO: 387 - protein, 77 aa, Phage F770/05
VIILIMFLLFAVGLSMLVIGLHRQWVINEMLRFPLSISRRHDLEMRRIHAWVMAVCGLGLLFAGCGPLFIFLAGGLL

SEQ ID NO: 388 - protein, 72 aa, Phage F770/05
MTIVQLLAVIAVLLLVVPTVLSFLRMLVWAAETWVRCETGRGNRGTAAVATVLYGVATWVCAYLFFVVGAYL

SEQ ID NO: 389 - protein, 67 aa, Phage F770/05
MLTIACIVLIVFCGYLFLVKCLASLTCFGALFVLPGAEKVAAVVGLVWNVFWAAVWVTAINFLFHVA

SEQ ID NO: 390 - protein, 98 aa, Phage F770/05
MSTNLNLTGRLFDIKIIPTNGKLTGFRVRMTLFNMDCPNTVLTHVVMCGDEYTAKSLKTAILQRRRLNLKHWHWTEVNKDLPGACTNRLKTKPFTLEI

SEQ ID NO: 391 - protein, 102 aa, Phage F770/05
MRTIAELIKIGLEWQQANRGETYMCFVLSDLANGVVVGPPITWDEYRSFKNWLWEKLHFRGSDSVLGLLERVGLDDSEENWVQFYAWAYYDLIKRNTYEHQP

SEQ ID NO: 392 - protein, 83 aa, Phage F770/05
MMYKYARIKRVRNITVYDIACQCWARDFQYDQCLFLLIQHGFSPIQSLEEFQRVWNMLDQAFADFCNERGCPADPIGFADVRI

SEQ ID NO: 393 - protein, 80 aa, Phage F770/05
MNTLYHKMQEHVCFVGFTRDGVNYQTNRVRTFGEARHFITFNCSPSDKDIRIFYRIPHEGAEDVEVVIARLDLTETKENN

SEQ ID NO: 394 - protein, 76 aa, Phage F770/05
MSNPHSVFRVNKCFVRMVTNGELITSPTIHNLEEMRDYNRNNCKPTDTGIRLSYMSETEGCEVVLARFDHNGKVLV

SEQ ID NO: 395 - protein, 63 aa, Phage F770/05
MDQNIYTLLYTNECLHSIEHEFEAVSDEVARIKATAMCRGQEGLWSGIYLTDPQGEAITFDPF

SEQ ID NO: 396 - protein, 84 aa, Phage F770/05
MFKALNQFFAMLESMFRAVTNLTKAAENVTEWAEEESAHFNNKARLQREQAIALLNIENAQELQEKGLTEAVESVRKERTKAKA

SEQ ID NO: 397 - protein, 35 aa, Phage F770/05
MVVVTQDQSTAQPKASLDLEVQTDDWVEVELNKVG

SEQ ID NO: 398 - protein, 216 aa, Phage F770/05
MNNKAVLNIKLPGQELVEIDLGISWHEYINNAGDDNTGLVYVKLAEYAELFDVVPNNPAEKKIAELEAKVKELEDKLKATSTEENRESFLCRVASRGSRKQADIVKKDGLFYWVGTIRGTTLRMESTFMDADFDPVLRDARDWVKTPTVMSGGLGVLVMSDRARNHRLELYWFAATGLFTGVATHTETGLAYVSPVKHRDWKDAWREIGCYIQGKD

SEQ ID NO: 399 - protein, 102 aa, Phage F770/05
MELNDTGKIRIVLTIQGKAYYLDALLTRDEWDTMTDAQKTKYMNEWVLASVSIRPQMPSSESDILKHKIHELELEVSRLKKQATPTFRYPPGVTIGHLPDQR

SEQ ID NO: 400 - protein, 86 aa, Phage F770/05
MKADWVSNLIFALVWSLYVPKPASEEHLWLFHLLHFLFALLLWTAIDVTRYSPEWKEKPVFAFFIFAPMVPMNLYGAMMLLELLWN

SEQ ID NO: 401 - protein, 70 aa, Phage F770/05
MDISYAHVQMKLKNGKTTSHKVEIPYSLSEVQDDFYSTVAQILNLVRRGTGISVLNVTHSRVLFTAGPNQ

SEQ ID NO: 402 - protein, 143 aa, Phage F770/05
MQLEPYARHIVNGELMSRNARVECGTKVFLLRDTLTHNPDTGRKLALGAGSQVIVMGLCIQYTEKGNIPLIAVHSINEDGDLFHALVDPNHLCYAECPVDRVLKLVQVEEMTVMLRNKGYEQSEKVAELLYSYGIHQLQEGKL

SEQ ID NO: 403 - protein, 129 aa, Phage F770/05
MVDRLLLDVSIEHMAWDQCLFQDEVHQLRLVVAGDVAGHVLVGHTLLGPPLDLGGEGTGVSLGVVQPHQLIGHVLRSMEVVVQLELTFLHHMGVPNDVVPEGFRHVRIGQHVIECLQYFRGDGLLHLVR

SEQ ID NO: 404 - protein, 85 aa, Phage F770/05
MQNAQSEKVQQESANSLLTHLKSPEKTELKIDVSDRAADAIDIMRQNAEALARLQQEMIAGKQLSAKDVAERSMDFGEVIEGELA

SEQ ID NO: 405 - protein, 255 aa, Phage F770/05
MNLDATPIAKAVADEVDFAGLDEAAKSVEQWLREVVYGDDSSYIPSIFALQFVDFIKMVNGNEGEENKTPVLHLRMLDQIGSGQTRIANMVFRGAAKTTVMGEYLFLYIALYGELPGFGKVDLALYVSDSIDNGVKNMRKNLEFRWENSEFLKKYIPQTNFTDIRWKFTNLDGKVFIVKGYGAKTGVRGAKEMGKRPQLAVLDDLVSDEDARSPTVIAAIEDTVYKAVDYALHPKKNMIIWSGTPFNAKDPLYKA

SEQ ID NO: 406 - protein, 244 aa, Phage F770/05
MTIQLKQVIDLLAEGELSNIKYVNIDTGALVLERVPSLIRAINLGVLDLHKRFLLKEGMLKIQLEEGRRLYPLRPAYQVGQKPKPGVPQFITDGNKLGRQSILKIEKIIGDNGVEYYLNDTWQPLNITTPEFDVLEISEEFYCHSSSKTLEVRYRRAPTPMKICVDNLDSWGCIDIDLPYTHLQALLYFVASRCQTPIGFMENTAQDGFNFSQKYEAECANLDAQNLRIDPVGNQDRFTRGGWV

SEQ ID NO: 407 - protein, 99 aa, Phage F770/05
MQLIKEYEHAQPLKFKGWQVSEDHEQNVQALQEMLGSFPFITAAFGDNADGERVYSLSNFNEGATLDVKAGEWIFVNEEGSIEGWSAEVGAVRFKEIQA

SEQ ID NO: 408 - protein, 128 aa, Phage F770/05
MPVRASDTAGGYDIFMPEGGVAYPNQPTKVKLGFSAAVPEGHVALLLPRSGTGSKAGLRLRNTCGVIDSDYRGEWVAVVSTDREPFHWEAGNRVLQMLLVPVATPELQLVEELSETNRGDGGFGSTGE

SEQ ID NO: 409 - protein, 255 aa, Phage F770/05
MADVDEDYLTLPNEDGDPSKRLQPEWSNAPSLAQLKQDYQEAKQVTDEKITQINRWLDYMHVRGEGKPKTEKGKSAVQPPTIRKQAEWRYSSLSEPFLSSPNIFEVNPVTWEDAESARQNGLVLNQQFNTKLNKQRFIDEYVRAGVDEGTIIVKVGWNYQSRTVKEQVVTYEMMPDSSEELAQIYQTAAQIREESPSEYPEIPEDVRLGLEETEANGIQVRAVPVGSEEEEREETVENHPTAQVCDYNNIVIDPS

SEQ ID NO: 410 - protein, 112 aa, Phage F770/05
MNEEHAIQITRKNAEKFVRLRDAMLRLHKNRDFQALILNDFLKDNAARLVLLKADKNMESPEMQARIIREIDAVGALHTYFQLIGVRGDEAEQAIKDCDAELERVREEEDEE

SEQ ID NO: 411 - protein, 255 aa, Phage F770/05
MADFLEMSDDDLPEFYEVEEQTRSDQEEPEQEQQNDEQSEEVVQEEEPADEEQEEEQEEEQDPLNSPDDELGDLPVEEKPTEEESEQEEEEEDGDKEESEETPTEEKPEAKKSEATKQEVDPADFMAKITAPFKANGRDLQVKTPEEAIRLMQMGANYNHKMSALKPNLHMMRQLDDAGLLNPDTIANVVDLLKHKKPEAIAKLAKDAGVDPLDLDEKSVADYKPTAVPFNQVREALDEQLDSIEHSPSYNRVVT

SEQ ID NO: 412 - protein, 255 aa, Phage F770/05
MAGPVDNIKPMKYNDPANGVESSIGPQIHTRYWYKRALIDAAKEAYFGQLADTFSMPKHYGKEIVRLHYIPLLDDRNVNDQGIDASGATIANGNLYGSSRDVGNITAKMPTLTEIGGRVNRVGFKRVEIKGKLEKYGFFREYTQEQLDFDSDPAMEGHVTTEMVKGANEITEDLLQIDLLNSAGTVRYPGAATSDAEVDASTEVTYDSLMRLRLDLDNARAPTKIKMITGTRMIDTRTVGNARALYVGSDLVPTI

SEQ ID NO: 413 - protein, 221 aa, Phage F770/05
MSLDELQNLSEAPLESPDTRSELEVLQEKATALGISFRSNTGVEKLREKINAVLNDEAVGDEEEDEATEATSSIPKPSAEAGAAALKAAEAPRPKTEGELRRDRRLAAHRLIRCRITCHNPNKNDWDAEYFSIGNDEIGTIRRLVPYEVDWHVPEALLNFIKSKQYQHFYTVTEQTPMGPQKVRRSKSVREFSVEILPQLSEDELESLRKQQAVNGSYKED

SEQ ID NO: 414 - protein, 255 aa, Phage F770/05
MAVEPITIADLTEVKLDGKGALDQLLQVTRLHLAKEHDAGRLKGQEYAAVLTGGITAVLQNAVMFLLQKDEAANKAALVEAQIKLTEKQGELLDKQIAQADKDAELIAAKVKLTLEQAKLPDSQIRSAGFQDLLVQEQTKVQTAQTRRIDQEILSAGFQDLLVKEQTAKTKQDVLTAVQQTKVMEQQVLESTQKVLNMKQELLNLVAQECLLKAQFDLTKDQGLNTQEQTILVRQKVASERAQTIGAGVDADSVI

SEQ ID NO: 415 - protein, 255 aa, Phage F770/05
MGLFSSKKKTVVNTTVQRVFDDAHIPDSPRTGVIQGITHETGIVENILEKLSDSIGVRANTAYLWAQRNNYYWGLPESKVVNGVDARTVVVQTIARSEGTITTYYNQFGPLNSLHWGFTELVRLYQYNPLTNELPGLSTTKGSKVYLFDMIPVFQTDTVAWADETANKGMLQDFGFSPKSGYTPSRPYNTIGGMGQFAGWSPYRTDNSFGEDYVLLTYEWKDAQGVIKQETIRMIMNLDLSLDYHQVRFRRQNGT

SEQ ID NO: 416 - protein, 155 aa, Phage F770/05
MAYPYSDMPFGVELDTSTLGSFGLGGPQTQLQMQMPAVDVNAAASGSGGFMSGFSNIFSRDSMFGGVAPSGAQTGGWVMPALGIGQAVFGAIGANRQQRAARDQLAESRRQFDMNYGAQRQSINTNLEDRQRARVASNPTAYESVDSYMERNRIR

SEQ ID NO: 417 - protein, 255 aa, Phage F770/05
MAQEITWRNIGATVSPGSASSMSAGTTGVQQALGALGDIISRQQEMNVNNAKLQREANTQSYLDQVAASTLEQLSNADYRSGLEAQRDAMGMNLDRAATRDAITKQISAQQNQAAATQKFDDMQAEVGQRGIVDQLRTLAAEGRAGEVNQILAEQQLINEGEIRKELTGVQDAIQNRQYRAAGEQRAQAAANRAAEAHSLSMAAGRENLAFTREQRDELRRDRDEAKLVSGTIATTFQDYDESRQAQSEIMRIVG

SEQ ID NO: 418 - protein, 255 aa, Phage F770/05
MADFDLDQFLSDRQEANAGATPAFDALDFASAGLDMKGSQKAYDLDGIRERKKRNVEESLIGKMGITPGAAGTEILNTAASFVSGTGRALGDVIALPINAAADMGQAGVTNEAIEAYNRYVSAQMQEGDEAILSQTAAGDDGVPQTMLQRMQGVDELRKFSTNVDKFFDWSSIVDTTRRDQLSDDIADATAGGVERLRNAGESFSRGEILDGLVQGALGVGQTAATAIGASATNPLAVGEYTVENAPQILAYAAN

SEQ ID NO: 419 - protein, 67 aa, Phage F770/05
MGVLKGLFGAGALAGAVIGILFIGFVFSWIFRILGVVVALFIVLLILCWVGWEWLKYCFSRKKEGEQ

SEQ ID NO: 420 - protein, 105 aa, Phage F770/05
MSLVDAVVEAKRQGVQHSLRGSNYESDIPPSLKALLDEALRLANEHSIPLYWSASLPNGVMTRAALGEKGENIHIQYLMSYAAAVQDPALAQEVVQKGMAFLDKK

SEQ ID NO: 421 - protein, 78 aa, Phage F770/05
MGDLSKACMLKNMHVTRVLHLIEMRNKLTNTLRDNATDDGMATLEMFDAALKQETDRFLRALRAVGNENINEIKKAAE

SEQ ID NO: 422 - protein, 85 aa, Phage F770/05
MAKFLLVGCKGWSALVWTPLRGGGCTRCNGPEHSLMPTGSIDIRKPAGGSWLGLQRHQLREVVNGPLDLGGQGGLGSGIQGPMRW

SEQ ID NO: 423 - protein, 51 aa, Phage F770/05
MAVNTKKSPPTRNHYENFRKGMKVVTYQRTKGNTLFTVDCDPVEVADLHAC

SEQ ID NO: 424 - protein, 134 aa, Phage F770/05
MKAKSYYLLAFAAPTGVGTVFQSAIHAFEQGKSHDFTVPLIAQIKERSGIGANSIMLSVSFLGTMTEAEFNPPFRPGMDATVAYLEGVRAGLENSEKDNPYPTGSVEAADYRNGRISGFSMREGQQPPQDHSPQ

SEQ ID NO: 425 - protein, 145 aa, Phage F770/05
MKIELQQAEVAAGIATYLTANGLKADASQLSISFQTTRKGDGGIVAFVEVPELAVASLVGTKAPVATEPQTVEVVEKPKKAEKKVVNTEAAAGLATAVAESKASEAAPVEVATEEPEPATEMEAKEEEPVAEQAAPASTGGSLFS

SEQ ID NO: 426 - protein, 186 aa, Phage F770/05
MARLNVIGMDPSMSNWGLACGQYDTTSNTLSLRHIEVIQTSKTKDKQIRVNSDDLNRSTEITTRVMEVIKEANVIFVEVPVGSQSAAAMKSYGMCIGILSAVRASGKPFHLLTPTDLKVMACNSKTASKEAMIEWAVKKYPHLNWPRTSKGEVIASRAEHMADACAAAEYGVFHHNDFKLALAMLT

SEQ ID NO: 427 - protein, 147 aa, Phage F770/05
MKVNPQDVKNMIVEESFTILPSGLTTVCQLTLVNGWTVTGQSSCVDPIEFDAEIGKEVARRNAEDEVWKFAGYELMQKLHKQNMGPKERLKLELDELKARQESLYSFLRSDAAASVHAYMGSLLVQQKDVQNNLIEILEERLQQWQD

SEQ ID NO: 428 - protein, 121 aa, Phage F770/05
MKVRELLDSLKRQLSYCTNPQQRERLLDHTLRIPVLRPGTVGARPSVDVLSVVPGFDWDDGSMFCEPNSDIKLTVLTPEEVKTIMASYSKGTSWFAYQETKKLREEINRLKKQLELLGGSE

SEQ ID NO: 429 - protein, 248 aa, Phage F770/05
MFGNLSTSNNSDIKEAKDSIGGGSRIFDTDIYAFKILAAYGSESSGGALAVNFEFEEHGTGRKLKIQQYVTSSKEKGQNNYYVNAEGEKHYLPGFNIVNAICLMTAEKELAACVPEQRTLKIYDYDAKAEVPKQVPVLADLTGKDIYLALEKIIENKRVKNEATGQYEDSSETRELNDVAAVFHFGTKKTLNEARAKAEPEFFDKWKEAKAGTVRDKTKKVAGGGAASGRPAPAGGQAGGGKPASLFS

SEQ ID NO: 430 - protein, 244 aa, Phage F770/05
MTQVNDHLVLVSGLSATGKSACLRNLREPEKVIYLNCEAGKRLPFKSRFIERTVTDPYQIPTVFDAVVEGKVEAHTIIIDTLTYLLDMYESQYIYRAANGQAAWMDFQQFFKDLMQQKVASSPCKVIFLAHTKEEYNKATMAMDVCVPVKGALKNNGIESYFSTVISTKKVELGKLEPFKENNKLLEITPQEEMLGYKHVFQTQITKETVGERIRGPMGMWTHEQTFIDNDIQKVLDHLDWYYN

SEQ ID NO: 431 - protein, 255 aa, Phage F770/05
MLKYEEMQHHPTSERIVEILCEKTQSKNHRFFRILVGFQFSMMAAHMRCHIKTHERGEIPVNMYALNLMPSGAGKGFSTKVMEDQITYGFRHRFMETFDTAAEKHLDDLAFKRHIRKGSELPDEQEAVRKEFKSLGPLLYDFDSGTGPAVKQMRHKLLMANAGAVNLVVDEIGLNLPAMTEIMPTFLELFDVGSVKQKLVKNTNDNLRGEEIIGRTPTNLMAFGTPGKLLDGGKTEDQLMELLETGYARRCFFGM

SEQ ID NO: 432 - protein, 255 aa, Phage F770/05
MGQIYTNQTGIPMAMALWLASDYYDYSEAGLSATTLLKPIRQVVLARRIKPSDSMADIEGMIANRMGAAIHDSIEKAWTVNKDRALDALGIPASVAKRVLVNPTEAELKAFNEANEQPAITVYMEQRSKKEYAGVMVSGKYDFVADGQVEDFKSTTTFSYIKDSKDSDYILQGSIYRALNPGLITKDTMRIHFIFTDWQKFMAKQNKDYPQSRVASKVFNLMPIAETEEWITNRVKWLMSLKDTPEADLPLCSDE

SEQ ID NO: 433 - protein, 126 aa, Phage F770/05
MRDPRYSPHPVCKAQHPQGQPCEDCEKLHRRLPVKSAEPAHKVQRDTAPLNRYQRPIPRAWKFVDVYRINMLFPLGELDPSGALDHARKKLMAPGQRSGGKSLWQDVKEARDTLNRWLEDNAGEDD

SEQ ID NO: 434 - protein, 142 aa, Phage F770/05
MEKLTPEDVPFKDFPIDSMPNLLAQMGKARADTIRFHGLDRRSIGGPRTRWFTNPHAKRLQGLPDAFSDRGVEDILSGIASATEGSQRPLSAARLFVLLQEPQLCYDLLMGGMALEKRQALRYMAAAKLAVFHLNRYFGASQ

SEQ ID NO: 435 - protein, 255 aa, Phage F770/05
MVDTCNINGVCGTGDWNGPKPGDPNMNDLLLKATPAFGGIDIEFTWPTTNPGAVGTTRLFRSTDANFAGATIRAFVNGNFYFDKTDPGSKVDQRYYYWIQLVSINGTDGDIIGPASATARPLIEQMIEQLTGEIDSGLLSQELRKEIAQIELNKLGITQEEIERAKNDDALGVRLTQIDAKMDQNTAILQEEVRARVTADSSLVQTVNTMYADFNGNIAAIQQENTALATKVNALASSVTTINATVNGDSASGKV

SEQ ID NO: 436 - protein, 99 aa, Phage F770/05
MSYGFRFYDANGNVTVDSTNKSFRSVYRQQVFPVLGGTTNLPPGFDASKGDIFFFTWFQLAPNPWPQFVDFGFVNNQIQWYDTYSTSYGKAYLNVVSFR

SEQ ID NO: 437 - protein, 223 aa, Phage F770/05
MTYGIKLTNENSDICIDELNPVYVVVFEGSYKYDSPGQDFIYVQFPTPIRSQSLPIFFAKQDGPHGFMDFTWFGSNGNWTGCRFVLTNFAGMAPSVYSGKYKIVAVHMPKTAGWGMQVFDADGNGVFDTGYTPAVFLGGIQRFLPYGYNPNFPGGRTLGSWYADATKIKQGAYFRVDFGNTTFRHNGFTIGMLNGPTGWMYIAAFISGNKPGYTIDHPLLAIE

SEQ ID NO: 438 - protein, 1024 aa, Phage F770/05
MTTKVIFTFHNPDGSPQANEKFTVRLTRPGMSDAEHCVVIPETYEMVTDAKGEFTMDLESSTSAYRVTAIGDDDEYEDDPCSQYTFTFYVPDSVDPVYVQELILMPPPNNLPWDEEAMNKITQAVVDARNARDDAEESADRAEAQVGLAAEQVTLAKAEVTKATAQADRSKTEADRATTQATNAANSATAAANSATQANTQANRAKTEADRSKSEADRARDLADAVAEKVEGGSLPPLVGMNETFTYEGTDPYRWTVSGPATAVSDGSVMRLTKTDGSGSRAFVRQAVSFPDSHWIVYMRVKTQTGTASRNCSAQIRFIAADNKNCVVYFNVNANGLVEPNTIHMQGTEGDTRNAATMFTGLGTEDWLDLAVKYDAVNRHIELFRRMPNGTWQKGGGRLMVDAIKPAFIEISSMPVAPQNWWLDTDFISVCKPNLICYGDSIAAGQNEYGVTRGNNPYNNNRNWAGTWFGKVPLYATNRNNLVLVQGVEGRRTWQYLSQLSEISNSGVKVVFIHASTNDVNDATMTMAKRTSDTQAIIDQLHAVGAQVVLFNSMQGTKAYNDASSTTVKLRDYTDQWWNTELPKVNGLAQTLDIARLIAKDGYMDPALGASDGLHLTNASAQKIADKLGQFFSNSSDTNGFASLDSPAFTGIPTVPTQTPFLPYGKQIANTEYVSTFIQDWTSNYGYGDLTMRNLTGAQMAGGGVRSGYYYVPGDSSNPLPGNVYAFVHHMSYDTNKGWELWNHCYTDRVYMRYSNNAGVWNTPVEMVTEKWMERNSFMTPRVSAFNRLPVASSVGFEGVVPLQTNSSGAWRNVNAGVAGLGLLGATTAGNALNYIGGMPKAPTNDRANSNLNNLPDECGFYGLGPAPYSNIPPGVDAINPVGSTVYHQVYDANTATQIFIPRTSDICYFRRKAGGTWSPWVRYLTDLQLVGTTTDSSAGVPNGAIMQVNGSAAVNVGVALRFADGTQIVRALLQLDYGAVDILQRQFTFPMAFVGKPVVTATLEQGTVADINNMPLQALGPVM

SEQ ID NO: 439 - protein, 124 aa, Phage F197/08
NYPRDVSTNGTVEYLVVTSDYKRMTYRPNGTNKVFVKRKEAGSWSEWSELAINDYNTPFETVQSAQSKANMAESNAKLYADDKFNKRYSVIFDGTANGVGSTLYLNESLDQFILLIFLWDFSRW

SEQ ID NO: 440 - protein, 62 aa, Phage F197/08
LNPSNLPDGDGNGGGVYEFGLTKSSRTSLTISNDVYFDLGSQRGSGANANRGTINKIIGVRK

SEQ ID NO: 441 - protein, 122 aa, Phage F197/08
MQILVNKRNEIISYAIIGGFEEGIDIENLPENFSQVFRPKAFKYSNGEIVFNEDYSEEKDDLHQQIDSEEQNTVASDDILRKMVASMQKQVVQSTKLSMQVNKQNALMAKQLVTLNKKIRRG

SEQ ID NO: 442 - protein, 37 aa, Phage F197/08
MLKLISPTFEDIKTWYQLKEYSKEDIAWYVDMEVIDK

SEQ ID NO: 443 - protein, 42 aa, Phage F197/08
MFGFTKRHEQDWRLTRLEENDKTMFEKFDRIEDSLRTQEKNL

SEQ ID NO: 444 - protein, 69 aa, Phage F197/08
MDAKVITRYIVLILALVNQFLANKGISPIPVDEESVSSIILTVVALYTTYKDNPTSQEGKWANQKIKEI

SEQ ID NO: 445 - protein, 31 aa, Phage F197/08
KAESKYRKATGQAPIKEVMTPTNMNDTNDLG

SEQ ID NO: 446 - protein, 192 aa, Phage F197/08
MTNVDNKKTKQKKWFDNSLGKQFNPDLFYGFQCYDYANMFFMIATGERLQGLYAYNIPFDNKARIEKYGQIIKNYDSFLPQKLDIVVFPSKYGGGAGHVEIVESANLNTFTSYGQNWNGKGWTNGVAQPGWGPETVTRHVHYYDDPMYFIRLNFPDKVSVGDKAKSVIKQATAKKQAVIKPKKNYACSRSWL

SEQ ID NO: 447 - protein, 213 aa, Phage F197/08
MLVAGHGYNDPGAVGNGTNERDFIRKYITPNIAKYLRHAGHEVALYGGSSQSQDMYQDTAYGVNVGNKKDYGLYWVKSQGYDIVLEIHLDAAGESASGGHVIISSQFNADTIDKSIQDVIKNNLGQIRGVTPRNDLLNVNVSAEINMNYRLSELGFITNKKDMDWIKKNYDLYSKLIAGAIHGKPIGGLVAGNVKTSAKNQKKSTSASRLYTR

SEQ ID NO: 448 - protein, 111 aa, Phage F197/08
MLKHQLKTKKNPPVPAGYTPDKNNVPYKKETGYYTVANVKGNNVRDGYSTNSRITGVLPNNTTITYDGAYCINGYRWITYIANSGQRRYIATGEVDKAGNRISSFGKFSTI

SEQ ID NO: 449 - protein, 103 aa, Phage F197/08
MLYLLLYSRSELYSRAEAMYLTVGPTGDIFLVITRYIYLNNIEMLHSLQPYLNRYGYIYSPTTNKTTDPINLGLWLFFCVFFGAKKRADYLKKGQTLVENLKG

SEQ ID NO: 450 - protein, 81 aa, Phage F197/08
MLTEGSYSQQKKGNPLCNNQIAGVLKKTTKALNMNKKVTTHTFRHTHITLLVEMNVSLKAIMKRVGHVDEKNNHSHIYSCN

SEQ ID NO: 451 - protein, 252 aa, Phage F197/08
LTFHALLDEWLEYHIKTSGSKLTTLNNIKIRIRNIKRYSSENLLLNKLDTKYMQIFINKLSDIYSQNQVTRQLGDMKGAIKYAVKFYNYPNEYLLTNVKIPKRRKTIEDIEKDESKMYNYLEMNQVLQIRDHILNDNKLHKRNRILIASILEVQALTGMRIGELQALQEKDIDLLNKTINITGTIHRIKYEEGFGYKDTTKTISSKRSISINSRTVEIFKKIILENKMLKRWNSSYVDRGFIFTTKKRESFM

SEQ ID NO: 452 - protein, 59 aa, Phage F197/08
MWIEKFKNKNNETKYRYYEKYKDPYTDKWKRVSVVLNKNTKQSQKRSNVSFRRKNKRKN

SEQ ID NO: 453 - protein, 49 aa, Phage F197/08
MTQFLGALLLTGVLGYIPYKYLTMIGLVSEKKQGYQYSCIIDFFLLKHV

SEQ ID NO: 454 - protein, 139 aa, Phage F197/08
LNLIQLLTGLKANILFLFIFVLTVFVFNPLIVKFIIWLINITRKFMKLDCISLLDKRDKLFNNNGKPVFIVIKDFENRIIEEGELKTYNSAGSDFDLLEVERQDFKVSDLASNDELYIKHTLVDLKQQIKLDLYLMNEY

SEQ ID NO: 455 - protein, 53 aa, Phage F197/08
LNGGENFMVDKNKKQETTRSNPLNKSFEKSGASEKLKSTLSEKAKKKRLVFIH

SEQ ID NO: 456 - protein, 131 aa, Phage F197/08
METNKTIDLMNYVEFPKRYTEAKGKLVAQPITTINSARRVENEDMTVCYILDQDDDVMDFIFDRDIITVYCPENGTATDEYFCEIIFNSDDTFTLKRLSNYVTIKDRSYPMSKINDVNITGKVVRLFRDFK

SEQ ID NO: 457 - protein, 128 aa, Phage F197/08
VKKEKTKKKKKIKKSQTQKHKDSKPKTQQEKNEKKLKIKNPPNNSIQNNSNNQNQSQNNQLNNNSDPSNNTPANINENDSQNTNLNDEYVVSPGWTKDEQAKAFEEYKKGKEEEARAGASAVPGANIN

SEQ ID NO: 458 - protein, 153 aa, Phage F197/08
LGLYEELCINNEKIKIEETDQLPNFQPGCYMNGKIYIRRNLSEVRKAEVLYEELAHHKLTYGNILDQTKWINRKFENYARRHGFTSAVPLHEIVEAHNYGVRNLYELSEYLQLSESYILEAIEQYKKIYGIGTHYGEYSITFEPLRVFKYKEI

SEQ ID NO: 459 - protein, 108 aa, Phage F197/08
MENNKVRKILSENLQELMNDKNIDQRELAEAIGVSQPTVSNWIQQTKYPRIKRIQQLADYFNVPKSRITESKKDIHQETIAAHFDKEGLTEEEIEEVNRFIEWVRNRD

SEQ ID NO: 460 - protein, 63 aa, Phage F197/08
MPEQLSVRKWRLVRDLKQQEVADILGVNAKTVGHWEKDDTNLSNVTVYALAKLYDIEVDQIKV

SEQ ID NO: 461 - protein, 58 aa, Phage F197/08
MNEEKLKMILLLLEDIPRDEWNRLVNEVNNQYSYQADKVGLASDNCQQIANNYKHYGF

SEQ ID NO: 462 - protein, 79 aa, Phage F197/08
VISIHKRLLTQYLDKEIVTSLDLHLINGEVIKVQEHIKDAESKTLHIIHPKDRVVSLDHVLYFDINVKGEKNNDSPYPS

SEQ ID NO: 463 - protein, 71 aa, Phage F197/08
VKKLYATPTQIHQLFGVCRSTVYNWLKYYRKDNLGVENLYIDYSPTGTLINISKLEEYLIRKHKKMVLGGY

SEQ ID NO: 464 - protein, 53 aa, Phage F197/08
MSDTYKSYLIAVLCFTVLAIVLMPLLYFTTAWSIAGFASIATFIYYKEYFYEE

SEQ ID NO: 465 - protein, 84 aa, Phage F197/08
MAENIKTEQHYYTKDFSGYRNEEDNFVANQELTVTITLNEYRKLIEIKAVKDKEEDTYRGKYFEEERKKRKIGKRKYKTKKQNL

SEQ ID NO: 466 - protein, 86 aa, Phage F197/08
MYYKIGEIKNKIISFNGFEFKVSAMKRHDGISIQIKDMNNVPFKSFHVIDLSELYIAMDAIHDVVNEWIEENTDEQDKLMNLVMKW

SEQ ID NO: 467 - protein, 82 aa, Phage F197/08
MAILEDIFEELKLLNNNLRVLNTELSTVDSSIVQEKVKEAPMPKEETAQLESIEEVKETSADLTKDYVLSVGKEFLKKSRYF

SEQ ID NO: 468 - protein, 278 aa, Phage F197/08
MKLDHSNRAHAKLSASGAKQWLNCPPSIKASEGIADKSTVFAEEGTFAHELSELYFSLKYEGLTQFEFNKAFQNYKRNQYYSEELREYVEEYVANVEEKYNEALSRDNDVIALFETKLDLGKYVPESFGTGDVIIFSGGVLEIIDLKYGKGIEVSAIDNPQLRLYGLGAYELLSLMYDIHTIRMTIIQPRIDNFSTEELPISRLLQWGADFVKPLARLAYNGGGEFKAGSHCRFCKINHSCRTRAEYMQNVPQKPPHLLSDEEIAELLYKLPDIKKMG

SEQ ID NO: 469 - protein, 91 aa, Phage F197/08
MKRLQNFYINCLISKKWADEVEQYALNQAKENDKNYPGWKLVEGRSRRMITDTKAMLEKLVEAGYKPEDITETKLLSITNLEKLIGKKSIF

SEQ ID NO: 470 - protein, 44 aa, Phage F197/08
LVKKAFSKITEGFIEKPQGKLTLATESDKRPAIKQSAEDDFDKL

SEQ ID NO: 471 - protein, 39 aa, Phage F197/08
MILTNYKNLKGRYINMKAKVLNKTKVITGKVRASYAHIF

SEQ ID NO: 472 - protein, 153 aa, Phage F197/08
MHIFFEPHSMQEGQESKYSISLIIPKSDTSTIKAIEQAIEAAKEEGKVSKFGGKVPANLKLPLRDGDTEREDDVNYQDAYFINASSKQAPGIIDQNKIRLTDSGTVVSGDYIRASINLFPFNTNGNKGIAVGLNNIQLVEKRRTSWRCKCSRR

SEQ ID NO: 473 - protein, 77 aa, Phage F197/08
MNIDIETYSSNDISKCGAYKYTEAEDFEILIIAYSIDGGAISAIDMTKVDNEPFHADFETFKIALFDPAVKKVCIQC

SEQ ID NO: 474 - protein, 90 aa, Phage F197/08
MPPEEWICTMVNSMRIGLPASLDKVGEVLRLQNQKDKAGKNLIRYFSIPCKPTKVNGGRTRNLPEHDLEKMATIYRLLYSRCRSRNDDCS

SEQ ID NO: 475 - protein, 138 aa, Phage F197/08
MEEEQETCLNMILKKWQQFIDYCIRDVEVEMTIAHKIKDFPVTAIEQAYWVFDQHINDRGIKLSKSLMLGANVLDKQSKEELLNQAKHITGLENPNSPTQLLAWLKDDQGLDIPNLQKKTVQEYLKEATGKAKKNARN

SEQ ID NO: 476 - protein, 121 aa, Phage F197/08
MHDMMCSDERVRGLFQFYGAGTGRWAGRGVQLQNLTKHYISDTELEIARDLIKEQRFDDLDLLLNVHPQDLLSQLVRTTFTAEEGNELAVSDFFCNRGKSHSMVCKRTMAFRCVQHTRKDI

SEQ ID NO: 477 - protein, 225 aa, Phage F197/08
MFNVPVESITKGDPLRQKGKVSELALGYQGGAGALKAMGALEMGIEENELQGLVDSWRNANPNIVNFWKACQEAAINTVKSRKTHHTHGLRFYMKKGFLMIELPSGRALAYPKASVGENSWGSQVVEFMGLDLNRKWSKLKTYGGKLVENIVQATARDLLAISIARLEASGFKIVGHVHDEVIVEIPRGSNGLKEIETIMNKPVDWAKGLNLNSDGFTSPFYMKD

SEQ ID NO: 478 - protein, 61 aa, Phage F197/08
MQHQAYINASVDIRIPTEVESVNYNQIDKEKENLADYLFNNPGELLKYNVINIKVLDLEVE

SEQ ID NO: 479 - protein, 93 aa, Phage F197/08
MMARRKVIRVRIKGKLMTLREVSEKYHISPELLRYRYKHKMRGDELLCGRKDSKSKDEVEYMKSQIKDEEKEREKIRKKSDFEPIPTKCESGI

SEQ ID NO: 480 - protein, 67 aa, Phage F197/08
MKKKREKKSEKKAILNLYQRNVRAEYEEERKRRLRPWLYDGTPQKHSRDPYWFDVTYNQMFKKWSEA

SEQ ID NO: 481 - protein, 85 aa, Phage F197/08
MSIISNRKVDMNETQDNVKQPAHYTYGDIEIIDFIEQVTAQYPPQLAFAIGNAIKYLSRAPLKNGHEDLAKAKFYVDRVFDLWEG

SEQ ID NO: 482 - protein, 66 aa, Phage F197/08
MATQKQVDYVMSLQEQLELEDCEKYTDEQVKAMSHKEVSNVIENYKTSIRNEELYYECMSFGLPNC

SEQ ID NO: 483 - protein, 54 aa, Phage F197/08
VAHTHVVNGTYYFHGHIVPGWQSVKKTFDTAEELEIYIKQHGLEYEEQKQLTLF

SEQ ID NO: 484 - protein, 84 aa, Phage F197/08
MNNREQIEQSIISASAYNGNDTEGLLKEIEDVYKKAQAFDEILEGLPNAMQDALKEDIGLDEAVGIMTGQVVYKYEEEQENEEI

SEQ ID NO: 485 - protein, 56 aa, Phage F197/08
MKKFNVQITYTGMIEETIEAESLEEAEFEADVIARLEAPFDCDEYEINVEEEQEND

SEQ ID NO: 486 - protein, 175 aa, Phage F197/08
MTNTLQVKLLSKDARMPERNHKTDAGYDIFSAETVVLEPQEKAVIKTDVAVSIPEGYVGLLTSRSGVSSKTHLVIETGKIDAGYHGNLGINIKNDAQVYLTTNEQCFDIQGEMENSFVNNAKKKPFTINDYYEIYKGDKLAQLVIVPIWTPELKQVEEFESVSERGAKGFGSSGV

SEQ ID NO: 487 - protein, 57 aa, Phage F197/08
VRERTKIIYRGWNKEIFILQGKNMNVIGLRQIFDELKRSYEGYKIVVIPIEVDFEIK

SEQ ID NO: 488 - protein, 95 aa, Phage F197/08
VTQYLVTTFKDSTGLPHEHITVARDNQTFTVVEAESKEEAKEKYEARNVPVDGATNLNDIKSNIGIFHVEKVEPNEGMVDINIETMKPFEEADDD

SEQ ID NO: 489 - protein, 79 aa, Phage F197/08
MINIPKMKFPKKYTEIISKKYKNKTPEEKAKIENDFIKDINDKDSEFYSPMMANMNEHELRAMLRMMPSLIDTGDDNDD

SEQ ID NO: 490 - protein, 128 aa, Phage F197/08
MIKKLKNMNWFDIFIAGILRLFGVIALMLVVISPIYTVASYQNKEVHQGTITDKYNKRQDKEDKFYIVLDNKQVIENSDLLFKKKFDSADIQARLKVGDKVEVKTIGYRIHFLNLYPVLYEAKKVDKQ

SEQ ID NO: 491 - protein, 50 aa, Phage F197/08
MIKQILRLLFLLAMYELGKYVTEQVYIMMTANDDVEAPSDFAKIRAEVSW

SEQ ID NO: 492 - protein, 352 aa, Phage F197/08
MLDKVTQIETIKYDRDVSYSYAASRLSTHWTNHNMAWSDFMQKLAQTVRTKEDLTEYNKMSKSEQADIKDVGGFVGGYLKEGKRRAGQVMNRSMLTLDIDYAAQDMTDILSMFYDFAYCLYSTHKHREISPRLRLVIPLKRNVNADEYEAIGRKVADIVGMDYFDDTTYQPHRLMYWPSTSNDAEFFFTYEDLPLLDPDKILNEYVDWTDTLEWPTSSREESKTKRLADKQGDPEEKPGIIGAFCRAYTIEEAIETFIPDLYEKHSTNRYTYHEGSTAGGLVLYENNKFAYSHHNTDPVSGMLVNSFDLVRIHLYGAQDEETKTDTPVNRLPSYKAMQQRAQNDEVVKKAIN

SEQ ID NO: 493 - protein, 209 aa, Phage F197/08
MKLLKKQLINDKMSDAMQDFDEIENSDDAWSETLEITSKGTFKASIPNIEIILRNDPNLKGKIAFNEFTKQIECLGKVPWNTNFKTRQWQDGDDSSLRSYIEKIYDIHHSGKTKDAIISVAMQNAYHPVRDYLNKISWDGHKRLEKLFIKYLGVEDTEVNRTTTKKALTAGIARVMEPGCKFDYMLTLYGPQGVGKSALLKKIRWCMVF

SEQ ID NO: 494 - protein, 243 aa, Phage F197/08
MEMAELAATRKAEVEAIKHFISKQVDRFRVAYGHYIEDFPRQCIFIGTTNKVDFLRDETGGRRFWPMTVNPERVEVNWSKLTKDEIDQIWAEAKYYYEQGEELFLNPELEEEMRSIQSKHTEESPYTGIIDEYLNTPIPSNWEDLSIFERRRFYQGDVDMLPTGNVDYVERNKVCALEVFVECFGKDKGDSRGSMEIRKISNILRQLDNWSVYDGNKSGKIRFGKDYGVQIAYVRDESLEDLI

SEQ ID NO: 495 - protein, 64 aa, Phage F197/08
MKESTLEKYLVKEITKLNGLCLKWVAPGTRGVPDRIIIMPEGKTFFVEMKQEKGKLHPLQKICA

SEQ ID NO: 496 - protein, 34 aa, Phage F197/08
VHRQFENRDHTVYVLWNKEQVNTFIRMVGGTFGD

SEQ ID NO: 497 - protein, 70 aa, Phage F197/08
MLVIAPKQVAKDTWVDEVDKWNHLNHLKVSLILGTPKERNDALNTEADIYVTNKENTKWLCDQYKKRMAI

SEQ ID NO: 498 - protein, 329 aa, Phage F197/08
MVVIDELSTFKSPKSQRFKSIKKKLPLINRFIGLTGTPSPNSLQDLWAQVYLIDRGERLESSFSRYRERYFKPTHQVSEHVFNWELRDGSEEKIYERIEDICLSMKAKDYLDMPDRVDTKQTVVLSEKERKVYEELEKNYILESEEEGTVVAQNGASLSQKLLQLANGAVYTDDEDVRLIHDKKLDKLEEIIEESQGQPILLFYNFKHDKERILQRFKEATTLEDSNYKERWNSGDIKLLIAHPASAGHGLNLQQGGHIIVWFGLTWSLELYQQANARLYRQGQNHTTIIHHIMTDNTIDQRVYKALQNKELTQEELMKAIKARIAKHK

SEQ ID NO: 499 - protein, 145 aa, Phage F197/08
MGNTIYDIKPGTFKYIESEIYNLNENKKEIKRLRLEILNPTKEQDSNIVYGPLQKGEPVRTTELMATRLLTNKMLRNLEEMVEAVESEYLKLPEDHKKVIRLKYWNKEKKLKMEQIGHECHMHRNTVTTIRKNFVKAVAYHAGIK

SEQ ID NO: 500 - protein, 110 aa, Phage F197/08
MTKHNNIYKHGRKSYQYDWFYHSKAWKKLREIALDRDNYLCQMCLREDIVTDANIVHHIIYVDEDFNKALDLDNLMSVCYSCHNKIHANDNDKSNLKKIRVLKNLNKKII

SEQ ID NO: 501 - protein, 77 aa, Phage F197/08
LYIETYEFYCRLRDELKNSDLMIEHTNKAGASNIIKNPLSIELTKTVQTLNNLLKSMGLTAAQRKKIVQEEGGFGDY

SEQ ID NO: 502 - protein, 116 aa, Phage F197/08
VTIKVLNEPSPKLLTTWYAEQVTQGKIKTSKYVRKECERHLRYLENGGKWVFDEELAHRPIRFIEKFCKPSKGSKRQLVLQPWQHFIIGSLFGWVHKETKLRRFKEALIFMGRKKW

SEQ ID NO: 503 - protein, 61 aa, Phage F197/08
MKQARILFDESKAMIKASPKLDKNFRTLRDEIHYDATISKIMPQASDSDKLDGLNTHMGIF

SEQ ID NO: 504 - protein, 59 aa, Phage F197/08
LISVIKNSRAARLQPLLIYITTAGYQLDGPLVDMVEAGRDTLDQIIEDERTFLLFSIFG

SEQ ID NO: 505 - protein, 71 aa, Phage F197/08
LDDDDDINDSSNWIKANPNLGVSINLDEMKEEWEKAKRTPAERGDFITKRFNIFANNDEMSFIDYPTLQKK

SEQ ID NO: 506 - protein, 128 aa, Phage F197/08
LITQHSKKNNEIVSLEELEGRPCTIGYDLSETEDFTAACATFALDNGKVAVLSHSWIPKHKVEYSNEKIPYREWEEDGLLTVQDKPYIDYQDVLNWIIKMNEHYVVEKITYDRANAFKLNQELKKLRV

SEQ ID NO: 507 - protein, 89 aa, Phage F197/08
LSPALKDLKEMFLDGKIIFNNNPLMKWYINNVQLKLDRNGNWLPSKQSRYRKIDGFAAFLNTYTDIMNKVVSDSGEGNIEFISIKDIMR

SEQ ID NO: 508 - protein, 209 aa, Phage F197/08
VNVIAKENIVTRIKKKLIDNWIDQSTSKLYDFSPWKNRSFWGVINNTLETNETIFSAITKLSNSMASLPLKMYEDYKVVNTEVSDLLTVSPNNSLSSFDFINQIETIRNEKGNAYVLIERDIYHQPSKLFLLNPDVVEMLIENQSRELYYSIHAATGNKLIVHNMDMLHFKHIVASNMVQGISPIDVLKNTTDFDNAVRTFNLTEMQKT

SEQ ID NO: 509 - protein, 24 aa, Phage F197/08
MLKYGSNVGKEKKAASVRRFQTVL

SEQ ID NO: 510 - protein, 127 aa, Phage F197/08
MQDQIQISRKNEELNRFYLQHTLLPIVKQYEEEFNRKLLTKTDREKNRYFKFNVKSYLRADSATQAEVYFKAVRSGYYTINDIREWEDLPPVEGGDKPLISGDLYPIDTPLELRKSLKGGDKNVNES

SEQ ID NO: 511 - protein, 82 aa, Phage F197/08
MSMKAKYFQMKRKSKSKGEIFIYGDIVSDKWFESDVTATDFKNKLDELGDISEIDVHINSSGGSVFEGHAIYNMLKNASCKN

SEQ ID NO: 512 - protein, 207 aa, Phage F197/08
MHPAKINIYVDALAASIASVIAMSGDTIFMHKNSFLMIHNSWVMTVGNAEELRKTADLLEKTDAVSNSAYLDKAKDLDQEHLKQMLDAETWLTAEEALSFGLIDEILGANEIAASISKEQYKRFENVPEDLKKDVDKITKIDDVDTSELVETPKESMSLEEKRKKEKKIKRECEILKNDNELLGGNEMPTLYELKQSLGMIGQQLKK

SEQ ID NO: 513 - protein, 339 aa, Phage F197/08
LSQKATDPNIDMEDIKQLETEKAGLQQRFNIVERQVQDIEEKEKAKVKDKGEAYQSLSDNEKMVKAKAEFYRHAILPNEFEKPSMEAQRLLHALPTGNDSGGDKLLPKTLSKEIVSEPFAKNQLREKARLTNIKGLEIPRVSYTLDDDDFITDVETAKELKAKGDTVKFTTNKFKVFAAISDTVIHGSDVDLVNWVENALQSGLAAKERKDALAVSPKSGLEHMSFYNGSVKEVEGADMYDAIINALADLHEDYRDNATIYMRYADYVKIISVLSNGTTNFFDTPAEKVFGKPVVFTDAAVKPIVGDFNYFGINYDGTTYDTDKDVKKRRIFVCINSMV

SEQ ID NO: 514 - protein, 54 aa, Phage F197/08
MSLEEIKLWLRIDYNFENDLIEGLIQSAKSELLLSGVPDYDKDDLEYPLFLYSD

SEQ ID NO: 515 - protein, 88 aa, Phage F197/08
MKRKKMKLYSCFCKIYNPSMKDREILKATESKSGLTIIMRSSKIEYLPQTNHLVKIDRGLYSDKLFNIKEIRIDTPDIGYNTVVLSEK

SEQ ID NO: 516 - protein, 50 aa, Phage F197/08
MSVEIKGIPEVLKKLESVYGKQSMQAKSDRALNEASEFFYKGFKERIREF

SEQ ID NO: 517 - protein, 86 aa, Phage F197/08
MKHLNFFIKALKKEFESFKDTGASIEEMTKSKPYTKVGSQERAVLIEWVGPMNRKNIIHLNEHGYTRDGKKIYTKRFWSYCKNISC

SEQ ID NO: 518 - protein, 131 aa, Phage F197/08
MNILNTIKGILLSDAELKTHINSRIYYYKVTENAETSKPFVVITPVYDLPSDFMSDKYLSEEYLIQIDVESSNNQKTIDITKRIRYLLYQQNLIQASSQLDAYFEETKRYVMSRRYQGIPKNIYYKNQRIE

SEQ ID NO: 519 - protein, 131 aa, Phage F197/08
MAEGQGSYKVGFKRLYVGVFNPEATKVVKRMTWEDEKGGTVDLNITGLAPDLVDMFASNKRVWMKKQGTNEVKSDMSIFNIPSDDLNTVIGRTKDKKWYILGRREYKSTVCNSNWRIGRWFNRSAGICSLT

SEQ ID NO: 520 - protein, 39 aa, Phage F197/08
MNRKVDVDGTSQGIVYGYHEGKEGETEFFKKSIRWIHGQ

SEQ ID NO: 521 - protein, 33 aa, Phage F197/08
VKIIQRILQVRYPANPQNVEVAVNSKSATVSAE

SEQ ID NO: 522 - protein, 151 aa, Phage F197/08
MTKTLKVYKGDDVVASEQGEGKVSVTLSNLEADTTYPKGTYQVAWEENGKESSKVDVPQFKTNPILVSGVSFTPETKSITVNADDNVEPNIAPSTATNKTLKYTSEHPEFVTVDERTGAIHGVAEGTSVITATSTDGSDKSGQITVTVTNG

SEQ ID NO: 523 - protein, 116 aa, Phage F197/08
MIKFEIKDRKTGKTESYTKEDVTMGEAEKCYEYLELVNQENKKEAPNATKMRQKERQLLVDLFKDEGLTEEDVLNKMSTKTYTKALQDIFREINGEDEEDSETEPEEMGKTEEQSQ

SEQ ID NO: 524 - protein, 36 aa, Phage F197/08
MEQYGWTLTEVRKQPYVKLLEILNEENKEETEEKTK

SEQ ID NO: 525 - protein, 61 aa, Phage F197/08
MNEKVEGMTLELKLDHLGVQEGMKGLKRQLGVVNSEMKANLSAFDKSEKINGKNIRRELRG

SEQ ID NO: 526 - protein, 53 aa, Phage F197/08
MIGLKFKKKMYSQVEDELKQVNANYQKAKSSVKDVEKAYLKLVEANKKRKISS

SEQ ID NO: 527 - protein, 54 aa, Phage F197/08
LRDAEQKLKNSNQATTAQLKRASDAVQKQSAKHKALVEQYKQEGNQVQKTKSAK

SEQ ID NO: 528 - protein, 327 aa, Phage F197/08
MKTFNKEQMIAQSHFGKLASQADVMSKKFSSIGDKMTSLGRTMTMGVSTPITLGLGAALKTSADFEGQMSRVGAIAQASSKDLKSMSNQAVDLGAKTSKSANEVAKGMEELAALGFNAKQTMEAMPGVISAAEASGAEMATTATVMASAINSFGLKASDANHVADLLARSANDSAADIQYMGDALKYAGTPAKALGVSIEDTSAAIEVLSNSGLEGSQAGTALRASFIRLANPSKNTAKEMKKLGIHLSDAKGQFVGMGELIRQFQDNMKGMTREQKLATVATIVGTEAASGFLALIEAGPDKINSYSKSLKNSNGESKKSSRFDER

SEQ ID NO: 529 - protein, 216 aa, Phage F197/08
MAKVKKAADLMKDNLKGALEQLGGAFESLAIEVGKDLTPMIRAGAEGLTKLVDGFTHLPGWVRKASVGLALFGAAIGPAVLAGGLLIRTVGSAAKGYASLNRRIAENTILSNTNSKAMKSLGLQTLFLGSTTGKTSKGFKGLAGAMMFNLKPINVLKNSAKLAILPFKLLKNGLGLAAKSLFAVSGGARFAGVALRFLTGPIGATITAITIAYKVF

SEQ ID NO: 530 - protein, 68 aa, Phage F197/08
LRIKFFKTAYDRVEWFRNGINGLGETIKFFGGKIIGGAVRKLGEFKKLSWKYRQKLQRKVFKRYERWL

SEQ ID NO: 531 - protein, 36 aa, Phage F197/08
MKDGYKSLSDDDLLKVGVNKFKGFMQTMGTASKKSV

SEQ ID NO: 532 - protein, 49 aa, Phage F197/08
VLGKGVSKETEKALEKYVHYSEENSRIMEKVRLNSGQISEDKAKKTFEN

SEQ ID NO: 533 - protein, 24 aa, Phage F197/08
MTCELKKEQELNQKIKELKEKSFE

SEQ ID NO: 534 - protein, 128 aa, Phage F197/08
LSDGQISENERKEIEKLENQRRDITVKELSKTEKEQERILVRMQRNRNAYSIDEASKAIKEAEKARKARKKEVDKQYEDDVIAIKNNVNLSKSEKDKLLAIADQRHKDEVRKAKSKKDAVVDVVKKAK

SEQ ID NO: 535 - protein, 98 aa, Phage F197/08
MALKVGGLTLEKTKRKKSDKYAKEQEETARRNRENIKKWFGNAWDGVKSKTGEAFSKMGRNANHFGGEMKKNVERNQRDSKQIKFRLELSQKFCRIPH

SEQ ID NO: 536 - protein, 358 aa, Phage F197/08
MWSGIKGIPSKLSSGWSSAKSSVGYHTKAIANSTGKWFGKAWQSVKSTTGSIYNQTKQKYSDASDKAWAHSKSIWRGTSKWFSNAYKSAKGWLTDMANKSRAKWDNISSTAWSNAKSVWKGTSKWFSNSYKSLKDWTGDMYSRAHDRFDAISSSAWSNAKSVFNGFRKWLSKTYDWIRDIGKDMGRAAADLGKNVANKAIGGLNSMIGGINKISKAITDKNLIKPIPTLSTGTLAGKGVATDNSGALTQPTFAVLNDRGSGNAPGGGVQEVIHRADGTFHAPQGRDVVVPLGVGDSVINANDTLKLQRMGVLPKFHGGTKKKDWLDQLKGNIGKKAGEFGATAKNTAHNIKKRCRRNG

SEQ ID NO: 537 - protein, 75 aa, Phage F197/08
MVEAAGDKIKDGASWLGDKIGDVWDYVQHPGKLVNKVMSGLNINFGGGANATVKIAKGAYSLLKKEISRQSKIVV

SEQ ID NO: 538 - protein, 300 aa, Phage F197/08
MPSGTNVYAVKGGIADKVWTDYGGGNSIQIKTGANEWNWYMHLSKQLARQGQRIKAGQLIGKSGATGNFVRGAHLHFQLMQGSHPGNDTAKDPEKWLKSLKGSGVRSGSGVNKAASAWAGDIRRAAKRMGVNVTSGDVGNIISLIQHESGGNAGITQSSALRDINVLQGNPAKGLLQYIPQTFRHYAVRGHNNIYSGYDQLLAFFNNRYWRSQFNPRGGWSPSGPRRYANGGLITKHQLAEVGEGDKQEMVIPLTRRKRAIQLTEQVMRIIGMDGKPNNITVNNDTSTVEKIVETNCYVK

SEQ ID NO: 539 - protein, 56 aa, Phage F197/08
MLSDKGNKLTDALIQTVSSQDNNLGSNDAIRGLEKILSKQSGHRANANNYMGGLTN

SEQ ID NO: 540 - protein, 65 aa, Phage F197/08
MQSFVKIIDGYKEEVITDFNQLIFLDARAESPNTNDNSVTINGVDGILPGAISFAPFFISIKVWL

SEQ ID NO: 541 - protein, 156 aa, Phage F197/08
MPGVKYAVNTANVTSNLKDGSSTEIEVSLNVYKGYSESVNWTDSEFLFDSNWMFENGIPLDFTPKYTHTSNQFTIWNGSTDTINPRFKHDLKILINLNASGGFELVNYTTGDIFKYNKSIDKNTDFVLDGVYAYRDINRVGIDTNRGIITLAPGKK

SEQ ID NO: 542 - protein, 141 aa, Phage F197/08
MDYHDHLSVMDFNELICENLLDVDYGSFKEYYELNEARYITFTVYRTTHNSFVFDLLICENFIIYHGEKYTIKQTAPKVEGDKVFIEVTAYHIMYEFQNHSVESNKLDDDSSETGKTPEYSLDEYLRYGFANQKNFGQNDL

SEQ ID NO: 543 - protein, 153 aa, Phage F197/08
MTYKIIGDFKRKVPIDELGNKNGLEYCKEAVDLFGCIIYPNDTEIGFYSPETFYQRSEKVIRYQYNTDTVSATVSTLELRTAIKVFGKKYTAEEKKNYNPIRTTDIKYSNGFIKEGTYRTETIGSKATINFDCKYGNETVRFTIKKGLSRWNI

SEQ ID NO: 544 - protein, 57 aa, Phage F197/08
LILDGKQIKQISCFAKSVQSETIDLIKNIDKGKHVLEMIFLGEDPKNRIDISSNKKS

SEQ ID NO: 545 - protein, 64 aa, Phage F197/08
MLELKKSTVLNLIADNSGRNQYKAIVDYVADSAKQFGIRYANTQTNEDIETQDKLLEFAKKANK

SEQ ID NO: 546 - protein, 117 aa, Phage F197/08
LQKKQINDTPKTELDVNYIGYEKIEPRDSVFFVHELMGYNTELKVVKLDRSHPFVNAIDEVSFSNEIKDMVQIQQALNRRVIAQDNRYNYQANRINHLYTSTLNSPFETMDIGSVLI

SEQ ID NO: 547 - protein, 96 aa, Phage F197/08
MATEEVKIKALLENDKQYFPATHWKAINGIPYAGSSDIDGLPQDGIISVDDKNKLDKLKIGEAGIIQNSIVQKSPNGKLWKITVDDSGKLGTVLFY

SEQ ID NO: 548 - protein, 208 aa, Phage F197/08
MENLYLIKDLGALAGRDYRAKEIQNLQRIEQFALGLTTEFKLHQKAKTMQHFAEQIYYNGRSQAAVNKSLQSQINALVVAPRNNSANEIVQARVNVNGETFDTLKEHLDDWETKTQINKEETIRELNKTKQEILDIEYRFEPDKQEFLFVTELAPLTNAVMQSFWFDNRTGIVYMTQARNNGYMLSRLRPNGQFIDSSLIVGGGSWYT

SEQ ID NO: 549 - protein, 72 aa, Phage F197/08
VGGHGTHNGYRYIDDELWIYSFILNGNNENTLVRFKYTPNVEISYGKYGMQDVFTGHPEKPYITPVINEKRK

SEQ ID NO: 550 - protein, 140 aa, Phage F197/08
MKKENKILYRIERPRSQWELENSMNYIEIRSLDDVDKNIDKVLHKISIPMRLTNETQPMQGVTFDEKYLYWYTGDSNPNNRNYLTAFDLETGEEAYQVNADYGGTLDSFPGEFAEAEGLQIYYDKDSGKKSFDARCYCRW

SEQ ID NO: 551 - protein, 166 aa, Phage F197/08
MTKIVVKKALMLGVTVGGDGNRTHRIFMIGQRGILEILHSRGVPFIMSDTGGRVKPLPMRPDKLKNLGMLTEPGLYYLYTDHTVQIDDFPLPREWRDAGWFLEVKPPQTGGDVIQILTRNSYARNMMTFERVLSGRTGDISDWNYVPKNSGKWERVPSFITKNVRY

SEQ ID NO: 552 - protein, 84 aa, Phage F197/08
MSDINIVGMSFYLTTDDTKRFTDFPTERKGVAGWNLYVEASNTGGFVHRLVRNSVTASAEILLKNYDSKTSSGPWTLHEGRIIS

SEQ ID NO: 553 - protein, 67 aa, Phage F197/08
MSNLEKSVAINLENTAHYENISNLDITFRTGESDSSVLLFNIIKNNQPLLLSEENIKARIAIRGKGV

SEQ ID NO: 554 - protein, 155 aa, Phage F86/06
MAGRPKKLLSNSNKNYTKEEIIEKERQEAQLNKFSKIDTEPPHFLDEIAKQEYLRILPHMQELPISNLDKAQLAQYCSFYSDFVKASLILEREDLILEDDKGNQKVNPAFNIKEKAGIRLQQTANTLGLTIDSRLRIMVPDEKEDDDPYMEFVSD

SEQ ID NO: 555 - protein, 564 aa, Phage F86/06
MTDYVTKYAKKVVSGEILASLKNIQVCKRHLSFMENPPNGCHWDNHLSNKAIKFVEMLPDPKTNQPMPLMEFQKFIVGSLYGWRRGQYRMFTKAYISMARKQGKSLIVSGMSVNELLFGQYPKFNRQIYVASSTYKQAQTIFKMASQQVNLMRSKSKFIREKTDVRKTDIEDVLSSSVFAPLSNNPDAVDGKDPTVAILDELASMPDDEMYSRFKTGMTLQKNPLTLLVSTAGDNLNSQMYQEYKYIKRILNEEVRADNYFVYCAEMDSQEEVQDETKWIKAMPLLESKEHRKTILQNVKADIQDELEKGTSYHKILIKNFNLWQAQREDSLLDISDWEQVITPMPNINGKDVYIGVDLSRLDDLTSVGFIFPNDDKKVFLHSHSFIGLRTNLEQKSKRDKINYELAIERGEAETTQSDSGMIDYKQVIDFIVKFITTHDLNVQAVCYDPWNAQSFITTIESMALDWPLIEVGQSFKALSQSIKEFRMWVADERIQHNDNMLLTTSVNNAVLIRDGEDNVKINKKMNRQKIDPIISIITAFTEARMHEFQENWTEKYESEEFGF

SEQ ID NO: 556 - protein, 79 aa, Phage F86/06
MKAKNSDFKGGDKMDLNKINVFFNFLVANLVSILFLLGLFVVNVSMYKAFGQNIGLLCIGITLIVISLILNHESNQERS

SEQ ID NO: 557 - protein, 416 aa, Phage F86/06
VGIFYKNEKRDLQYNEDDLQMMVQTLPGFQGTKLRQYKDIEAIRHSDIFTAVMMIASDLARMPIRVTVNGQINYSDRIVNLLNTRPNPMYNGYIFKLVVFVSALLTSHGYIEITRDKTGEPMNLTFRKTSEIELKSDARGRLYYFHQRIDSNGNNIERNVKFEDMLDIKFYSLDGINGLSLLDTLSRTIESDNNGKDFLNNFLRNGTHAGGILKMKGVLDNKKARDRAREEFHKSFSGTKQAGKVVVLDESMTFDQLEVDTEVLKLIRENKSSTREIAGVFGIPLHKFGIETANMSITDANLDYLSTLKPYITCVCAELNFKFNDEYVNREFKFDTTEIRVVDEKTQAEIDKINIDSGKMNIDEIRQRDGLAPIPGGNGSIHRVDLNHVNIELVDEYQMNKSRATDKKLKGGEENE

SEQ ID NO: 558 - protein, 194 aa, Phage F86/06
MSKETRVGNIIEVRSNDNNEMVIEGYALKFDTWSENLGGFKETISRRALENTDLSDVRCLVDHIPSQIIGRTKSGTLELETDDVGLKYRCKLPNTTFARDLYENMRVGNINQCSFGFMLDDKGDEVRFDEQENIYKRTLTAIRELTDVSVVTYPAYKDTDVKPALRSIETVKKEQRKKELEIRLKKHSILNNIW

SEQ ID NO: 559 - protein, 415 aa, Phage F86/06
MKTKEELQSEISDIKRQIDLKVKYATRALNNDELEKAEKLEQEITDLRSQIQEKQEELDKLKEKDGTSENNQQSVEVNEARTYRNQANINDLGISIQNTKVTSQEVRDFTEYLETRNDIQGGSLKTDSGFVVIPEEIVTDILKLKEVEFNLDKYVTVKRVTNGSGKYPVVRQSEVAALEKVEELEENPELAVKPFFQLAYDINTHRGYFRISREAIEDAKVNVLQELKLWMARTIAATRNKAIIDVITKGSTGSTSSGFEKEGKKLEVKKAKSLDDIKDAINLNVKPNYEHNVAIVSQTMFAKLDKMKDKLGNYLIQPDVKEKTQQRLLGAKIEILPDEVLGQKGNNTLIIGNLKDAIVLFDRSQYQASWTDYMHFGECLMIAVRQDCRILDYKSAIVIEYDDSERGEGDLGLEA

SEQ ID NO: 560 - protein, 52 aa, Phage F86/06
MAMYEVKKSYTDLEKGQYLKSGKRVEMTVKRAEYVNKKLKEHGVILERVKEE

SEQ ID NO: 561 - protein, 110 aa, Phage F86/06
MQLTAEELKLLKKHCKIDHNSEDDLLEIYYSWAFHEIASAVTDEPSKYIDWFKSHPLFARAIYPLASYYFENRIAYLDRDLSLAPHMVLSTVHKLRGSFEQFLESENDEI

SEQ ID NO: 562 - protein, 111 aa, Phage F86/06
MMKFNSNKLNERIDFCEDVSERVNGNPMKPKTKILYSCFACIQESKESDTQTNLNTGSKFIKTIIIRDTRGDYKPTNKHYVLHEGQRFNIKYVKPDYQDKSYLRIYGEVVI

SEQ ID NO: 563 - protein, 125 aa, Phage F86/06
MGARIESNNIEQGLKNAVLKMNLNSNVIVKAGAMSLVPLLKSNTPFADTKKHARDHIAVSNVKTDRDTSEKIVTIGYAKGVSHRIHATEFGTMYQKPQLFITKTEKQGKNKVLKTMLDTAKRLQK

SEQ ID NO: 564 - protein, 126 aa, Phage F86/06
MINVTKIIRNAIIANNITDEVNVFNYTIDDHFHEKTDKPIIRIYPLPFNPDTYADDNEISREYHYQIDVWWSQDEPNEQAEKIVELLKVINFQCYYREPLYESDVMSFRHIIRAKGSILSMKLEEN

SEQ ID NO: 565 - protein, 317 aa, Phage F86/06
MIEKLKQAPRFLKLNLQHFADTGVSGIAIGVSNFYYAPILKDTENEWETGAGTRIRFLKEIEVDRPQDTEEDYGDDMVAATAVSNGKLSVKTTFVTVPADDKAFLNGAKKGVGGYKYGAKDIPPDVAIVFERRNHDESSEWVGLFKGKFTRSSIKGQTKQDKVEFQNDDVEGNFIDRLFDESSHVTGYDKKGSTTGRDYVFMETFGKTYDEFMSSRGEQNMEPVEKEMKKTEKVEVTSVNVTDEQVTVKVDATKQLSATTEPSGQKVTYAVTEGQTYASVTSTGLVKGLAEGNATVTATAGKQTDTVQITVQSNLEM

SEQ ID NO: 566 - protein, 148 aa, Phage F86/06
MERTSIELITGFTKTGKPQYQKYLAKPIITLFETIQGSKLGLKLNKAFKGADFKDLTEEEFNNLSVTEQEEYKNKQEEYENNMAVQMEVLEEVLDFIVEAFDNQFTSIELQKGLPNGQEGIEKIGQLIGRITGGEPSDTKKFVTENQK

SEQ ID NO: 567 - protein, 1549 aa, Phage F86/06
MPNPIGNMVIKVDLDGSGFNRGVTGLNRQMKMVSRELSANLSQFSRYDNSLEKSKIKVEGLSKKQKVQAQITKELKDSYDKLSKETGENSAKTQAAAAKYNEAYAKLNQYERELNQATQELKDMQREQKALNTAMGKLGTNFNNFGPKLQEIGNSMKNVGRNMTMYVTAPVVAGFAVAAKKGIEFDDSMRKVKATSGATGEEFEALKKKAREMGATTKFSASDSAEALNYMALAGWDSKQMMEGLSGVMDLAAASGEELGAVSDIVTDGLTAFGLKAKDSGHFADVLAQTSSKANTDVRGLGEAFKYVAPVAGALGYTIEDTSIAIGLMSNAGIKGEKAGTALRTMFTNLSSPTRAMGNEMERLGISITDSNGKMIPMRKLLDQLREKFKHLSKDQQASSAATIFGKEAMSGALAIINASDEDYQKLTKSIDSSTGASKRMADTMESGLGGKLRTLRSQLEELALTIYDRIEPALKIIVSAFSKVVTWVTKLPTSIQLAVVGFGLFAAVLGPLVFMFGLFISVMGNAMTVLGPLLINVNKAGGIFAFLRTKIASLVKLFPILGVSISSLTLPITLIVGALVGIGIAFYQAYKRSETFRNIVNQAISGVANAFKAAKLALQGFFDLFKGDSKGAVTLEKIFPPETVAGIQNVVNTIRTTFFKVVDAIVGFAKEIGAQLASFWKENGSEITQALQNIAGFIKATFEFIFNFIIKPIMFAIWQVMQFIWPAVKALIVSTWENIKGVIQGALNIILGFIKFFSSLFTGNWRGVWDGIVMILKGTVQLIWNLIQLWFVGKILGVVRYFGGLLKGLISGIWSVIKGIFTKSLSAIWNATKSIFGFLYNSVKSIFTNMKNWLSSTWNNIKSNTVGKAHSLFTGVRSKFTSLWNATKDIFTKLRNWMSNTWNSIKDNTVGIAGRLWDKVRNIFGNMRDGLKSIIGKIKDHIGGMVDAIKKGLNKLIEGLNWVGGKLGMDEIPRLHTGTEHTHTTTRLVKNGKITRDTFATVGDKGRGNGPNGFRNEMIEFPNGKRVITPNTDTTAYLPKGSKVYNGAQTYSMLNGTLPRFSIGTMWKDIKSGASSAFNWTKDQIGKGTKWLGDKVGDVMDFIDNPGKLLNYVLQAFGVDFSSLTKGMGIAGDITKAAWSKIKKSAIKWLEDAFAESGDGGVLDMNKLRYLYGHTAAYTRETGRPFHEGLDFDYIYEPVPSTINGRAQVMPFHNGGYGKWVKIVKGALEVIYAHLSKYKVKTGQQVRVGQTVGISGNTGFSTGPHLHYEMRWNGRHRDPLPWLRKNNGGGKSTPGGNGAANARRAIKAAQNILGGRYKASWITNEMMRVASRESNYTANAVNNWDSNARAGIPSRGMFQMIDPSFRAYAKSGYNNPLNPTHQAISAMRYIVGKWVPRTGSWRAAFKRAGDYAYATGGKVYNGLYHLGEEGYPEWIIPTDPSRANEAHKLLALAANDIDNRSKNKRPNNLPNPSISNSDTNYIHTLENKLDAVINCLVSLVESNQVIADKDYEPVINKYVFEDEVNNSIDKRERHESTRVRFRRGGTII

SEQ ID NO: 568 - protein, 496 aa, Phage F86/06
MQDTIQIDNKTIEWLVVQRGFEIPSFNFVTEKESVKGRTGSIAKARYLNDIEFELPLIIRNEVLAPGGQKTHDDILEELVEFFDIDNLKPKKLKFKSQNWYWFAYFDGPLKLPKNPRGSVKFTIKVVLTDPYKYSVTGNKNTAISDQVSVVNSGTADTPLIVEARAIKPSSYFMITKNDEDYFMVGDDEVTKEVKDYMPPVYHSEFRDFKGWTKMITEDIPSNDLGGKVGGDFVISNLGEGYKATNFPDAKGWVGAGTKRGLPKAMTDFQITYKCIVEQKGKGAGRTAQHIYDSDGKLLASIGYENKYHDRKIGHIVVTLYNQKGDPKKIYDYQNKPIMYNLDRIVVYMRLRRVGNKFSIKTWKFDHIKDPDRRKPIDMDEKEWIDGGKFYQRPASIIAIYSAKYNGYKWMEMNGLGSFNTEILPKPKGARDVIIQKGDLVKIDMQAKSVVINEEPMLSEKSFGSNYFNVDSGYSELIIQPENVFDTTVKWQDRYL

SEQ ID NO: 569 - protein, 1260 aa, Phage F86/06
VIHVLDFNDKIIDFLSTDDPSLVRAIHKRNVNDNSEMLELLISSERAEKFRERHRVIIRDSNKQWREFIINWVQDTMDGYTEIECIASYLADITTAKPYAPGKFEKKITSEALKDVLSDTGWEVSEQTEYDGLRTTSWTSYQTRYEVLKQLCTTYKMVLDFYIELSSNTVKGRYVVLKKKNSLFKGKEIEYGKDLVGLTRKIDMSEIKTALIAVGPENDKGKRLELVVTDDEAQSQFNLPTRYIWGIYEPQSDDQNMNETRLRSLAKTELNKRKSAVMSYEITSTDLEVTYPHEIISIGDTVRVKHRDFNPPLYVEAEVIAEEYNIISENSTYTFGQPKEFKESELREEFNKRLNIIHQKLNDNISNINTIVKDVVDSELEYFERKIHKSDTPPENPVNDMLWYDTSNPDVAVLRRYWNGRWIEETPNDVEKLGGITREKALFSELNNIFINLSIQHASLLSEATELLNSEYLVDNDLKADLQASLDAVIDVYNQIKNNLESMTPETATIGRLVDTKTLFLEYRKKLQDVYTDVEDVKIAISDRFKLLQSQYTDEKYKEALEIIATKFGLTVNEDLQLVGEPNVVKSAIEAARESTKEQLRDYVKTSDYKTDKDGIVERLDTAEAERTTLKGEIKDKVTLNEYRNGLEEQKQYTDDQLSDLSNNPEIKASIEQANQEAQEALKSYIDAQDDLKEKESQAYADGKISEEEQRAIQDAQAKLEEAKQNAELKARNAEKKANAYTDNKVKESTDAQRKTLTRYGSQIIQNGKEIKLRTTKEEFNASKRTLSRVLADITVNAMKGIYLRYDENGAITSHTIDKDGVKISGDKVDITANREFNVVANNINNKVGKNDIVNSLNLSNEGLDINVNRIGIKGGNANRYVQVQNDFIELGGIVQRTWKGKRSTDDIFTRLKDGHLRFRNNTAGGSLYMSHFGISTYIDGEGEDGGSSGTIQWWDKTYSDSGMNGITINSYGGVVALTSDYNRIIIDSYASANIESREAPIYLSPNTKNKPGLNRFAFTLSNADSAYETDGYIMFGSDENYKYGAGLRFSKRSNKGLVQVVNGDYATGGDTTIESGMGKFNIVKRRDGNSYVSIQSYDLLAVGSDNAGDRVASNSIYKRTYSAPANLHITSAGTIGRATSAKKYKISIENQYINEDDQFSHSKEILKLPIRTWFDKYESEIMAKELESGKKLSDDTFKLSRHTGLIAEEVEELGFNEFVIYDDNGEIEGIAYDRLWVHLIPIIKNQQSKIEKLEELINE

SEQ ID NO: 570 - protein, 50 aa, Phage F86/06
MNDSNQGLQANPQYTIHYLSQEITRLTQENAMLKAYIQEQNEKSKSAEEE

SEQ ID NO: 571 - protein, 95 aa, Phage F86/06
MANEIIKKTERFILVQIDKEGTERVLYQDFVGSFTTSDSASYAQDFKSEENAKKIAETLNLLYQLTVNQNGVKVVKEVVDRTDLSSDKSVDSEIM

SEQ ID NO: 572 - protein, 124 aa, Phage F86/06
LDDIQKIKKELSELVERVDDVEILANETADHVLELREEHKQHHNELRESHKELKDKQDKVVDENLEQTKILNRIEERYQTQVDVAQKNEEKTLAQNKWLVGAIWALVTIVMIAVITASITALLP

SEQ ID NO: 573 - protein, 44 aa, Phage F86/06
MLALLKSLERRCLMITISTMLQFGLFLIALIGLVIKLIELSNKK

SEQ ID NO: 574 - protein, 84 aa, Phage F86/06
MINWKIRMKQKSFWVAILSAIFLFAQNIAKAIGYDIQVYTEQLTDGLNAILGFLVLTGVIQDPTTKGIGDSHQALEYEEPRRKY

SEQ ID NO: 575 - protein, 255 aa, Phage F86/06
MKTYSEARARLRWYQGRYIDFDGWYGYQCADLAVDYIYWLLEIRMWGNAKDAINNDFKNMATVYENTPSFVPQIGDVAVFTKGIYKQYGHIGLVFNGGNTNQFLILEQNYDGNANTPAKLRWDNYYGCTHFIRPKYKSEGLMNKITNKVKPPAQKAVGKSASKITVGSKAPYNLKWSKGAYFNAKIDGLGATSATRYGDNRTNYRFDVGQAVYAPGTLIYVFEIIDGWCRIYWNNHNEWIWHERLIVKEVFSFLG

SEQ ID NO: 576 - protein, 163 aa, Phage F86/06
MLKRSLLFLTVLLLLFSFSSITNEVSASSSFDKGKYKKGDDASYFEPTGPYLMVNVTGVDGKGNELLSPRYVEFPIKPGTTLTKEKIEYYVEWALDATAYKEFRVVELDPSAKIEVTYYDKNKKKEETKSFPITEKGFVVPDLSEHIKNPGFNLITKVVIEKK

SEQ ID NO: 577 - protein, 68 aa, Phage F86/06
VRDGYSTNSRITGVLPNNATIKYDGAYCINGYRWITYIANSGQRRYIATGEVDKAGNRISSFGNFSAV

SEQ ID NO: 578 - protein, 209 aa, Phage F86/06
MKIRKSILAGTLAIVLASPLVTNLDKNEAQASTSLPTSNEYQNEKLANELKSLLDELNVNELATGSLNTYYKRTIKISGLKANIWFLIIFVLTVLVFNPLIVKFIIWLINETRKFMNLDCISLLDKRDKLFNNNGKPVFIVIKDFENRIIEEGELKTYNSAGSDFDLLEVERQDFKVSDLPSNDELYIKHTLVDLKQQIKLDLYLMNEY

SEQ ID NO: 579 - protein, 48 aa, Phage F86/06
LNGGENFMADKNKKQEATRSNPINKSFEKPGASENLKSTLSEKAKKKD

SEQ ID NO: 580 - protein, 60 aa, Phage F86/06
MKITNCKIKRETIVYEVLTSGNQPFTYELPKDLSSHNARKYLEFISQKIDGDKLTKEDSL

SEQ ID NO: 581 - protein, 113 aa, Phage F86/06
MIKKIFTKKHVFLVIEDENHNHSDAVFGKSILLSIYVGVNKKTNSKSGKFIYLDRSKRIVRQSDITKIESANENDVDFYNLLKKEKEIVYSKNIVDKYNLANYIIYYEVSTKE

SEQ ID NO: 582 - protein, 310 aa, Phage F86/06
MKKYDIAVLDFETMNEHMNSPCEVAVSLIKDLSIVKVYSSYINPPNNRYNLKNAKIHKIPEDVILKAPKYPDIYQEILYLLKESHLIIAHNALFDISVLKNTNNYYDLPVPNFMYVDSINIFRSFHAISSFKLENLCSLYDIDKEKLHSAKFDVLALSKMLISLAKNNQHYSVLKLIHYMPKQYIRFSKYSNSPTKLFDSGFQKIHMKISEINKIEVESVIPILKDKNVVFTGNFDTEKQDLMILTRKKGAYIRSDVTAKTDILVEGVQDDKYKDVNGLVSKQRKAREYVGNGAKIQFLNEEDLINLIKE

SEQ ID NO: 583 - protein, 237 aa, Phage F86/06
MNKERNIIIAKNIRKFLNDSNMSQKKLAELINIKPSTLSDYLNLRSNPSHGVIQRIADVFEVGKSDIDTTYKDDNDITSIYNKLTPPRQENVLNYANEQLEEQNSKGDNVVDINSYKQEKTPVNVNGCVSAGVGERLHDETLFTEMVKGPIPTHDLALKVNGDSMEPMFKDGEIIFVEKTHNIKNGQIGIFIIEEEAYVKKVFVEDDRLTLVSLNKDYDDLHFYRNESVRLIGKVIL

SEQ ID NO: 584 - protein, 87 aa, Phage F86/06
MKTLKELRTDYGLTQKELGDLFKVSSRTIQNMEKDSTNIKDSLLSKYMSAFNVKYDDIFLGNEYENFVFTNDKKKSIILAFKEKQTS

SEQ ID NO: 585 - protein, 71 aa, Phage F86/06
MNIQVATKLAMEKGISIRRENQDVYGILPTNLQRYQCLVVSRHYKKKRQTAAGRWQPSADDLIADDWILDY

SEQ ID NO: 586 - protein, 109 aa, Phage F86/06
MTDEAKFVLLQLYSIYLDRIDEGMSKRSASYFGSDESSFNAFFLGFNFEDYIDAVLELKHRDFVIASAEDGGFLEMALSREGIAYSESESKKDYKTLMGLIRDLKKLII

SEQ ID NO: 587 - protein, 250 aa, Phage F86/06
MQALQTKSNIGEMFNIQEKENGEIAISGRELHQALEVKTPYKKWFERMSDYGFEENIDYIVTDIFVHNPLGGRQNQTDHALTLDTAKEIAMIQRSEPGKRARQYFIQVEKAWNSPEMIMQRALKIANNTINQLETKIERDKPKIVFADAVATTKTSILVGELAKIIKQNGINIGQRRLFEWLRQNGFLIKRKGVDYNMPTQYSMERELFEIKETSITHSDGHTSISKTPKVTGKGQQYFVNKFLGEKQTS

SEQ ID NO: 588 - protein, 65 aa, Phage F86/06
MQAQNKKVIYYYYDEAGNRRPVNIQYNDGYDLMIDPRFIEMTLERHPHLKNNFYGLIDGKEFKLD

SEQ ID NO: 589 - protein, 46 aa, Phage F86/06
MLQKFRIAKEKNKLKLKLLKHASYCLERSNNPELLRAVAELLKKVN

SEQ ID NO: 590 - protein, 210 aa, Phage F86/06
VYIDPLKNVRFSINNVISNVEISKSMAIKQSLKPKYQLDIINRNNINLFSDFKVDFHLNNLIEMNFNLRNSFSSLTFQRNLFSEETIKSFKELYRFDDEIVLQAQQTIRDFYINPTAISTLAEAINSTYPINEQSTYKRHDEFVKRIENDFPHPFKKLIRWSNGIAAGADIQIFVTNYINENDLHIQNSLIVAIVCLLSFLSTYCSHSKK

SEQ ID NO: 591 - protein, 106 aa, Phage F86/06
MPHILNVTVPIPETHVLITKDEYDELIGYSLDPVWNMSDLKKKLKIASDETIKDRLLFHPRFEKELRAQGIVHYPDENFNRWRFNARKMNKFVDEHFNEIYKERIK

SEQ ID NO: 592 - protein, 53 aa, Phage F86/06
MSNIYKSYLLAVLCFTVLAIVLMPLLYFTTAWSIAGFASIATFIFYKEYFYEE

SEQ ID NO: 593 - protein, 20 aa, Phage F86/06
MKKLLLAPTSNSDKRLTKLI

SEQ ID NO: 594 - protein, 108 aa, Phage F86/06
MTKNYKDMTQEELRDLLAEKNGELFEVVNEINKETEFAVLLFSTVGVSNGDTTSSSHCALGDIVGLANLLNNENDYHDIANVIEMYKLKKLLGLADNKEDENDVLQNG

SEQ ID NO: 595 - protein, 86 aa, Phage F86/06
MYYKTGDVCQKIINVDGFDFRLRVKKRAYSVEIVVLDHEGNSIDGILVSDENDLYTALDILKQSIYEWIENNTDEQDKLMNLVMKW

SEQ ID NO: 596 - protein, 87 aa, Phage F86/06
MRDTERNILNIFKTLFDEYTLSNQRALLEIERNHHGYLSINFLHYHDSYKTNNKLVQIHEINPDSHERIKNLIIEVLRGHRKIKKGA

SEQ ID NO: 597 - protein, 647 aa, Phage F86/06
MKINKLTISNFAGIKEVTFNFDGKDAKIYGNNATGKTTTATALQWLLFDKGLDGSTKSFNPVPLNEKNAENYELIPTVFAEFEIDGKITTFKKESHPKYTINQKTNRKEYSRSRTKKQYINDESIKVKDYKARIDELIDEDVFKLITNPQAFNLLDWKKRRSLLFEIAKPINDEDVIKTNDDFKELNNILGDHEIETKKKILTDKIKQINKDIKDIPIRINQTQQNKQDVPEFDNDRYAIIKQEIEQLENERIDIQNGKEEINLRNQLADKQSELKRIEDNNSASNENKIHALTNELHVENGTVANLKTRLKQNKQQITHEENRRNQLLENHKGLKSDLEKSKNQKFEHLDDNVCSCCGQQLPTEQVNEAREKALQKFNVKKSKELETIQTSINHIISEGKKIKPIIEKLEDDNNNLQIKINEAEERSARIQNKINKLKTTHVDVTQTDEYKAVMLEINEINQKRSNIRKTIQDKVSGIDDKISELTQEKSEIEVSRSIEKSNKHLDDVISELRNEEDRLLDEKEKYSHDLYILKKFTTTKVKMLTENINNEFDIAEFKLFNTLVNGELEETCSTTVNGVEYDSGLNNASRINVGLDIINTLSKHFKVTAPIFIDNAESVTELIKTESQQIQLIVNEQDKKLRMETI

SEQ ID NO: 598 - protein, 306 aa, Phage F86/06
MTENNKLQTIEQQLVQEKNVSDNVLNKVRVLESQGNLELPNDYSPSNAMKQAWLQISQDNKLMSCNDTSKANALLDMVTQGLNPAKNQCYFIPYGNKMQLQRSYHGNVMMLKRDAGAQDVVAQVIYKGDTFKQEMGETGRIKAIKHEQDFFNIDKENIIGAYCTIVFNDGRDNYIEVMTIEQIKQAWMQSSMIKDEKALQNSKTHNNFKEEMAKKTVINRAAKRYINTSTDSNIFKYAQESEQRQRKEVLDAEVEENANQEQLDFEQPVLEEAQYTELENDKPIDVSDFEEIKEPATEKESEEEPF

SEQ ID NO: 599 - protein, 161 aa, Phage F86/06
MTAGTQQAMNFESHRLCTIKAKQELRIGTWSILPFDIEHDANEPVAFLLQSTLGYKVLYVTDTKYLKYKFNGITHMMLEVNYIYEQMQENIKNGSVHSTLANRIMESHFSLEHAIGMLKANDLTRLEEIHLIHLSSQNSNAKYIKSEIQKVTGVPVYVGGL

SEQ ID NO: 600 - protein, 156 aa, Phage F86/06
MINRTILVGRLTRDPELRTTQSGVNVASFTLAVNRTFTNAQGEREADFINVIVFKKQAENVNKYLSKGSLTGVDGRLQTRNYENKEGQRVYVTEVIADSIQFLEPKNSNDTQQDLYQQQVQQTRGQSQYSNNKPVKDNPFANANGPIEIDDDDLPF

SEQ ID NO: 601 - protein, 297 aa, Phage F86/06
MTGWISIDRSIQNHWLFKEKRTFSKFEAWIYLLMEANHSKAKVPIGNQIVTVERGQRLTSILTLSDLFNWSRFKVKTFLDLLESDGMLEVKTTSKYTLITIVNYDFYQSEQGRNQHQNDIKPTSKQHQSNINPTSKQHQTNTNNNDNKDNNEKNVNNEKKKVTAFDFFQDNGFGFITPYNLDDLNYYLDSFENDSDQIVTASLKIAKDRNKVTWGYAKSILNTWLNANLKSIEQVRAFEKQQLESKKQNYKPFVKQSKEKTPKWLTDSTRETKTPEVDENLEKDREAFIKRLNSKWE

SEQ ID NO: 602 - protein, 72 aa, Phage F86/06
MDAFDKYYLFDHDGNKMFSVTPHFKDGRHLVVGLKHTKFNGRRWYLDDYELKTLIDNEQMELGHQTSLFEYI

SEQ ID NO: 603 - protein, 138 aa, Phage F86/06
MRDYMEIEIKFNEVFNAPMGSPRPRFRNTGRYAHTYMPTKYTEHKKYLQNQMPKLNLENALKIELEFYFPLLKSWSKKKKNEMVGQYKVTKPDIDNLIKTVLDACNGHLWKDDNQITEITSSKRYGIEPKIIIRIEEI

SEQ ID NO: 604 - protein, 122 aa, Phage F86/06
MARKARIVTINDKPYRFSKFEMELIESHGITAGMVSKRVKDGWELHEAMDAPEGTRLSEYREKKTIERLEQARLERKLERERKKEAELRRKKPHLFNVPQKHPRGRYACYLLENDIFVKVKK

SEQ ID NO: 605 - protein, 80 aa, Phage F86/06
MTDNARKEYLNQFFGFKRYLYQDNERVAHIHVVNGTYYFHGHIVPGWQSVKKTFDTAEELEIYIKQHGLEYEEQKQLTLF

SEQ ID NO: 606 - protein, 57 aa, Phage F86/06
MEMMNAEKHMQMMQMLQNCVIDKYVSHDEYEELIAIDKHGNKMFIKFYPNTEDDTNE

SEQ ID NO: 607 - protein, 83 aa, Phage F86/06
MNNREQIEQSVISASAYNGNDTEGLLKEIEDVYKKAQAFDEILEGMTNAIQHSVKEGVELDEAVGIMAGQVVYKYEEEQENEH

SEQ ID NO: 608 - protein, 60 aa, Phage F86/06
MSISVGDKVFNPETNSTLEIVQLVGDIRDTHYKLSDGSIISLIDFVVKPIHLIKEEQEND

SEQ ID NO: 609 - protein, 180 aa, Phage F86/06
MTNTLQVRLLSENARMPERNHKTDAGYDIFSAETVVLEPQEKAVIKTDVAVSIPEGYVGLLTSRSGVSSKTHLVIETGKIDAGYHGNLGINIKNDEERDGIPFLYDDIDAELEDGLISILDIKGNYVQDGRGIRRIYQINKGDKLAQLVIVPIWTPELKQVEEFESVSERGAKGFGSSGV

SEQ ID NO: 610 - protein, 68 aa, Phage F86/06
VTQYLVTTFKDSTGRKHTHITKAKSNQRFTVVEAESKEEAKEKYEKQVKRDAVIKVGQLFENIRECGK

SEQ ID NO: 611 - protein, 128 aa, Phage F86/06
MIKKLKNMDGFDIFIVGILSLFGITALLLVVALPIYTVASYQNKEVHQGTITDKYNKRQDKEDKFYIVLDDKQVIENSDLFFKGKFDSADIQARLKVGDKVKVKTIGYRIHFLNLYPVLYEVKKVDKK

SEQ ID NO: 612 - protein, 49 aa, Phage F86/06
MIKQILRLLFLLAMYELGKYVTEQVYIMMTANDDVEAPSDYVFRAEVSE

SEQ ID NO: 613 - protein, 66 aa, Phage F86/06
MWITMTIVFAILLLVCISINSDRAREIQALRYMNDYLLDEVVKTKGYNGLKEYRIELKRMNNDIKK

SEQ ID NO: 614 - protein, 178 aa, Phage F86/06
MYNRKEIREMIDNYKWMKNIIDSKVYDNESTSIAQYGYQSAMPKAKGTTSNKVLVKVINKNKALRKYDYLINKIAFIDEYEEYITNEKDYHILQMLKQRESHNRIMSILDIGRDNFYSRVKDIVNILYNLQTRNRHIVHIGQFGHIVQIVQIVHIGLILMLHIVFYYNCYVAKHLYLF

SEQ ID NO: 615 - protein, 150 aa, Phage F86/06
MEISKYQEIATRTHNDELNLNESITCYGLGLTQSTGNVTDLIKQHMFCNVPIDKGIMINELSEALWNIANLTNVLGINLDEIAGHSVNTILMNKPNQTINLDNGIKQGDKVLFQGSKYLVDGSIGNLLLISNDKDDRQVTVQDVKKVDKE

SEQ ID NO: 616 - protein, 117 aa, Phage F86/06
LSIMKRCGHPTCNVLINHNESYCDKHKQYANENYNDLRRRNDPEYLRFYKSKTWQNMRRIVLLEHDFICVSCGNQATMVDHIVPTKIDWARRLDKSNLQPLCDACHNQKTKEDLKKY

SEQ ID NO: 617 - protein, 114 aa, Phage F87s/06
MEIIVDENLVLKEKERLQVLYKDIPSNKLKVVDGLIIQAARLRVMLDYMWEDIKEKGDYDLFTQSEKAPPYERERPVAKLFNARDAAYQKIIKQLSDLLPEEKEDTETPSDDYL

SEQ ID NO: 618 - protein, 553 aa, Phage F87s/06
MISNKYVDEYINLWKQGKIILNKERIDLFNYLQKHIYSRDDVYFDEQKIEDCIKFIEKWYFPTLPFQRFIIANIFLIDKNTDEAFFTEFAIFMGRGGGKNGLISAISDFLSTPLHGVKEYHISIVANSEDQAKTSFDEIRTVLMDNKRNKTGKTPKAPYEVSKAKIINRATKSVIRYNTSNTKTKDGGREGCVIFDEIHYFFGPEMVNVKRGGLGKKKNRRTFYISTDGFVREGYIDAMKHKIASVLSGKVKNSRLFAFYCKLDDPKEVDDRQTWEKANPMLHKPLSEYAKTLLSTIEEEYNDLPFNRSNKPEFMTKRMNLPEVDLEKVIAPWKEILATNREIPNLDNQMCIGGLDFANIRDFASVGLLFRKNDDYIWLGHSFVRQGFLDDVKLEPPIKEWEKMGLLTIVDDDVIEIEYIVDWFLKAREKYGLEKVIADNYRTDIVRRAFEDAGIKLEVLRNPKAIHGLLAPRIDTMFAKHNVIYGDNPLMRWFTNNVAVKIKPDGNKEYIKKDEVRRKTDGFMAFVHALYRADDIVDKDMSKALDALMSIDF

SEQ ID NO: 619 - protein, 387 aa, Phage F87s/06
MSILEKIFKTRKDISYMLDLDMIEDLSQQAYVKRLAIDSCIEFVARAVAQSHFKVLEGNRIQKNDVYYKLNIKPNTDLSSDSFWQQVIYKLIYDNEVLIVVSDSKELLIADSFYREEYALYDDIFKDVTVKDYTYQRTFTMQEVIYLKYNNNKVTHFVESLFEDYGKIFGRMIGAQLKNYQIRGILKSASSAYDEKNIEKLQAFTNKLFNTFNKNQLAIAPLIEGFDYEELSNGGKNSNMPFSELSELMRDAIKNVALMIGIPPGLIYGETADLEKNTLVFEKFCLTPLLKKIQNELNAKLITQSMYLKDTRIEIVGVNKKDPLQYAEAIDKLVSSGSFTRNEVRIMLGEEPSDNPELDEYLVTKNYEKANENGSTLKGGDEDESGD

SEQ ID NO: 620 - protein, 245 aa, Phage F87s/06
MKVEIKGVIVSNEDKWVYEMLGMDSTCPKDVLTQLEFSDEDVDIIINSNGGNLVAGSEIYTHLRAHKGKVNVRITAIAASAASLIAMAGDHIEMSPVARMMIHNPSSIAQGEAKDLNHAAETLEHVGQIMAEAYAVRAGKNKQELIEMMAKETWLNADEAIEQGFADSKMFENDNMQIVASDTQVLSKDVLNRVTALVSKTPEVNIDIDAIANKVIEKINMKEKESEIDVADSKLSANGFSRFLF

SEQ ID NO: 621 - protein, 381 aa, Phage F87s/06
MTINLSETFANAKNEFINAVNNGEPQERQNELYGDMINQLFEETKLQAKAEAERVSSLPKSAQTLSANQRNFFMDINKSVGYKEEKLLPEETIDRIFEDLTTNHPLLADLGIKNAGLRLKFLKSETSGVAVWGKIYGEIKGQLDAAFSEETAIQNKLTAFVVLPKDLNDFGPAWIERFVRVQIEEAFAVALETAFLKGTGKDQPIGLNRQVQKGVSVTDGAYPEKEEQGTLTFANPRATVNELTQVFKYHSTNEKGKSVAVKGNVTMVVNPSDAFEVQAQYTHLNANGVYVTALPFNLNVIESTVQEAGKVLTYVKGLYDGYLAGGINVQKFKETLALDDMDLYTAKQFAYGKAKDNKVAAVWKLDLKGHKPALEDTEETL

SEQ ID NO: 622 - protein, 94 aa, Phage F87s/06
MVKFKVVREFKDIEHNQHKYKVGELYPAEGYNNPRVELLTNQIKNKYDKVYIVPLDKLTKQELLELCESLQKKASSSMVKSEIIDLLNGEDNDD

SEQ ID NO: 623 - protein, 94 aa, Phage F87s/06
MTIDDLLVKFKSLEKIDHNSEDEYLKQLLKMSYERIKNQCGVFELENLIGQELILIRARYAYQDLLEHFNDNYRPEIIDFSLSLMEVSEDEESV

SEQ ID NO: 624 - protein, 120 aa, Phage F87s/06
MKKVFKKPRITTKRLNTRVHFYKYTENNGPEAGEKEEKLLYSCWASIDGVWLRELEQAISNGTQNDIKLYIRDPQGDYLPSEEHYLEIESRYFKNRLNIKQVSPDLDNKDFIMIRGGYSS

SEQ ID NO: 625 - protein, 135 aa, Phage F87s/06
MSVKVTGDKALERELEKHFGIKEMVKVQDKALIAGAKVIVEEIKKQLKPSEDSGALISEIGRTEPEWIKGKRTVTIRWRGPFERFRIVHLIENGHVEKKSGKFVKPKAMGGINRAIRQGQNKYFETLKRELKNCD

SEQ ID NO: 626 - protein, 138 aa, Phage F87s/06
VIDILYKVHEVISQDRIIREHVNINNIKFNKYPNVKDTDVPFIVIDDIDDPIPTTYTDGDECAYSYIVQIDVFVKYNDEYNARIIRNKISNRIQKLLWSELKMGNVSNGKPEYIEEFKTYRSSRVYEGIFYKEEIKWQ

SEQ ID NO: 627 - protein, 109 aa, Phage F87s/06
MAIKHASAPKAYFNITGLGFAKLTKEGAELKYSDITKTRGLQKIVLNWWRTKNKLMLMVVQSNQGTQTEKVKFRYKCMLSLKRFAKLFLMKIMMKMAFTKRNKVNKTIT

SEQ ID NO: 628 - protein, 138 aa, Phage F87s/06
MHAFPKEIRKIVFNEDYDEDGVYEEKQGKQNNYVAVWFRQERRDGTFRTVLLPKVMFTNPKIDGETAEKDWDFSSEEVEGEALFPLVDNKKSVRKYIFDSANMTNHDGDGEKGEEAFLKKILGEEYTGNVTEGNEETL

SEQ ID NO: 629 - protein, 46 aa, Phage F87s/06
LKYTTDQTNIVSINSDGQVTAEAQGIATVKATVGNMSDTITINVEA

SEQ ID NO: 630 - protein, 116 aa, Phage F87s/06
MAKLKRNIIQLVEDPKANEIKLQTYLTPHFISFEIVYEAMDLIDDIEDENSTMKPREIADRLMDMVVKIYDNQFTVKDLKERMHAPDGMNALREQVIFITQGQQTEETRNFIQNMK

SEQ ID NO: 631 - protein, 53 aa, Phage F87s/06
MLKNMDTLMMDLIENGKDANEVLKMPFHYVLSIYQNKNNDISEEKAEALIDAF

SEQ ID NO: 632 - protein, 1514 aa, Phage F87s/06
MGERIKGLSIGLDLDAANLNRSFAEIKRNFKTLNSDLKLTGNNFKYTEKSTHSYKQRIKELDGTITGYKKNVDDLAKQYGKVSQEQGENSAEAQKLRQEYNKQANELNFLEKELEKTTTEFEEFKKAQVEAQRMAESGWGKTSKVFESMGPKLTKMGDGLKSIGKGLMIGVTAPVLGIAAASGKAFAEVDKGLDTVTQATGATGGELKKLQNSFKDVYGNFPADAETVGGVLGEVNTRLGFTGKELESATESFLKFSHITGSEGVQAVQLITRAMGDAGIEADEYQSVLDMVAKAAQASGISVDTLADSITKYGAPMRAMGFEMKESIALFSQWEKSGVNTEIAFSGLKKAISNWGKAGKNPREEFKKTLAEIEKTPDIASATSLAIEAFGAKAGPDLADAIKGGRFSYQEFLKTIEDSQGTVNQTFKDSESGSERFKVAMNKLKLVGADVWTSIESAFAPVMEELIKKLSIAVDWFSNLSDGSKRSIVIFGGIAAAIGPVVFGLGAFISTIGNAVTVLAPLLAGIAKADGLISFLSTKVPILGTVFTALTGPIGIVLGVLAGLAVAFTIAYKKSETFRNFVNGAINSVKQTFSNFIQFIQPFIDSVKNVFKQAVSAIVDFAKDIWSQINGFFNENGISIVQALQNICNFIKAIFEFILNFVIKPIMFAIWQVMQFIWPAVKALIVSTWENIKGVIQGALNIILGFIKFFSSLFTGNWRGVWDGIVMILKGTVQLIWNLIQLWFVGKILGVVRYFGGLLKGLISGIWGVIKGIFTKSLSAIWNATKSIFGFLYNSVKSIFTNMKNWLSSTWNNIKSNTVGKAHSLFTGVRSKFTSLWNATKDIFTKLRNWMSNIWNSIKDNTVGIAGRLWDRVRNIFGSMRDGLKSIISKIKDHIGGMVDAVKRGLNKLIEGLNWVGGKLGMDKIPKLHTGTEHTHTTTRLVKNGKIARDTFATVGDKGRGNGPNGFRNEMIEFPNGKRVITPNTDTTAYLPKGSKVYNGAQTYSMLNGTLPRFHFGTTMWKDIKSSASSAFNWTKDQIGKGTKWLGDKVGDVMDFIDNPGKLLNYVLKAFGVDFSSLTKGMGIVGDITKASWNKIKSKAINWIKEGLESQAGDGSVFDSFRILQPYSAPPKPPNPNYPFNGGVHHGVDYDTPTGTPIRTPMGGRVRSWYDNYGGGKAITVQKGRTFLWFMHLSEQLRRTGEQIKAGQLIGKSGNTGSMTNYRHLHFQVNQGGESNRYSTDPIPWLRKNDKTGGKNSPGGSGSENARRAIRTAQNILGGQYKASWITHEMMRVARRESNYTANAVNNWDSNARAGTPSRGMFQMIDPSFRAYAKSGYNNPLNPTHQAISAMRYIVGKWVPRTGSWRAAFKRAGDYAYATGGKVYNGLYHLGEEGYPEWVIPTDPARKNEAMKMLHYAAAEVRGRKASKNKRPSQLSSVNGFDDPSLLLKMIEQQQQQIALLLKIAQSNDVIADKDYQPIIDEYAFDKKVNASIEKRERQESTKVKFRKGGIAIQ

SEQ ID NO: 633 - protein, 394 aa, Phage F87s/06
VVRNDYLSHNGFKTHDDVLNELVKFFNYEEQVKLQFKSKDWYWNAYFEGPIKLHKEFAIPVKFTIKVVLTDPYKYSVTGYKNTAISDQVSVVNSGTADTPLIVEARAIKPSSYFMITKNDEDYFMVGDDEVTKEVKDYMPPVYHSEFRDFKGWTKMITEDIPSNDLGGKVGGDFVISNLGEGYKATNFPDAKGWVGAGTKRGLPKAMTDFQITYKCIVEQKGKGAGRTAQHIYDSDGKLLASIGYENKYHDRKIGHIVVTLYNQKGDPKKIYDYQNKPIMYNLDRIVVYMRLRRVGNKFSIKTWKFDHIKDPDRRKPIDMDEKEWIDGGKFYQRPASIIAIYSAKYNGYKWMEMNGLGSFNTEILPKPKGARDVIIQKGDLVKIDMQAKSSCHQ

SEQ ID NO: 634 - protein, 363 aa, Phage F87s/06
VIHVLDFNDKIIDFLSTDDPSLVRAIHKRNVNDNSEMLELLISSERAEKFRERHRVIIRDSNKQWREFIINWVQDTMDGYTEIECIASYLADITTAKPYAPGKFEKKTTSEALKDVLSDTGWEVSEQTEYDGLRTTSWTSYQTRYEVLKQLCTTYKMVLDFYIELSSNTVKGRYVVLKKKNSLFKGKEIEYGKDLVGLTRKIDMSEIKTALIAVGPENDKGKRLELVVTDDEAQSQFNLPTRYIWGIYEPQSDDQNMNETRLRSLAKTELNKRKSAVMSYEITSTDLEVTYPHEIISIGDTVRVKHRDFNPPLYVEAEVIAEEYNIISENSTYTFGQPKEFKESELREEFNKRLNIIHTKVKR

SEQ ID NO: 635 - protein, 861 aa, Phage F87s/06
MLWYDTSNPDVAVLRRYWNGRWIEATPNDVEKLGGITREKALFSELNNIFINLSIQHASLLSEATELLNSEYLVDNDLKEDLQASLDAVIDVYNQIKNNLESMTPETATIGRLVDTQALFLEYRKKLQDVYTDVEDVKMAISDRFKLLQSQYTDEKYKEALEIIATKFGLTVNEDLQLVGEPNVVKSAIEAARESTKEQLRDYVKTSDYKTDKDGIVERLDTAEAERTTLKGEIKDKVTLNEYRNGLEEQKQYTDDQLSDLSNNPEIKASIEQANQEAQEALKSYIDAQDDLKEKESQAYADGKISEEEQRAIQDAQAKLEEAKQNAELKARNAEKKANAYTDNKVKESTDAQRKTLTRYGSQIIQNGKEIKLRTTKEEFNATNRTLSNILNEIVQNVTDGTTIRYDDNGVAQALNVGPRGIRLNADKIDINGNREINLLIQNMRDKVDKTDIVNSLNLSREGLDINVNRIGIKGGDNNRYVQIQNDSIELGGIVQRTWRGKRSTDDIFTRLKDGHLRFRNNTAGGSLYMSHFGISTYIDGEGEDGGSSGTIQWWDKTYSDSGMNGITINSYGGVVALTSDNNRVVLESYASSNIKSKQAPVYLYPNTDKVPGLNRFAFTLSNADNAYSSDGYIMFGSDENYDYGAGIRFSKERNKGLVQIVNGRYATGGDTTIEAGYGKFNMLKRRDGNRYIHIQSTDLLSVGSDDAGDRIASNSIYRRTYSAAANLHITSAGTIGRSTSARKYKLSIENQYNDRDEQLEHSKAILNLPIRTWFDKAESEILARELREDRKLSEDTYKLDRYVGLIAEEVENLGLKEFVTYDDKGEIEGIAYDRLWIHLIPVIKEQQLRIKKLEESKNAG

SEQ ID NO: 636 - protein, 50 aa, Phage F87s/06
MQDNKQGLQANPEYTIHYLSQEIMRLTQENAMLKAYIQENKENQQCAEEE

SEQ ID NO: 637 - protein, 73 aa, Phage F87s/06
MAKEIINNTERFILVQIDKEGTERVVYQDFTGSFTTSEMVNHAQDFKSEENAKKIAETLNLLYQLTNKKQRVK

SEQ ID NO: 638 - protein, 98 aa, Phage F87s/06
LGWFKKHEHEWRIRRLEENDKTMLSTLNEIKLGQKTQEQVNIKLDKTLDAIQKEREIDEKNKKENDKNIRDMKMWVLGLVGTIFGSLIIALLRMLMGI

SEQ ID NO: 639 - protein, 44 aa, Phage F87s/06
MVALLKSLERRRLMITISTMLQFGLFLIALIGLVIKLIELSNKK

SEQ ID NO: 640 - protein, 84 aa, Phage F87s/06; identical to SEQ ID NO: 574

SEQ ID NO: 641 - protein, 251 aa, Phage F87s/06
MKTYSEARARLRWYQGRYIDFDGWYGYQCADLAVDYIYWLLEIRMWGNAKDAINNDFKNMATVYENTPSFVPQIGDVAVFTKGIYKQYGHIGLVFNGGNTNQFLILEQNYDGNANTPAKLRWDNYYGCTHFIRPKYKSEGLMNKITNKVKPPAQKAVGKSASKITVGSKAPYNLKWSKGAYFNAKIDGLGATSATRYGDNRTNYRFDVGQAVYAPGTLIYVFEIIDGWCRIYWNNHNEWIWHERLIVKEVF

SEQ ID NO: 642 - protein, 163 aa, Phage F87s/06
MLKRGLLFLTVLLLLFSFSSITNEVSASSSFDKGKYKKGDDASYFEPTGPYLMVNVTGVDGKGNELLSPHYVEFPIKPGTTLTKEKIEYYVEWALDATAYKEFRVVELDPSAKIEVTYYDKNKKKEETKSFPITEKGFVVPDLSEHIKNPGFNLITKVVIEKK

SEQ ID NO: 643 - protein, 98 aa, Phage F87s/06
VPAGYTLDKNNVPYKKETGYYTVANVKGNNVRDGYSTNSRITGVLPNNATIKYDGAYCINGYRWITYIANNGQRCYIATGEVDKAGNRISSFGNFSAL

SEQ ID NO: 644 - protein, 116 aa, Phage F87s/06
MKIRKSILAGTLAIVLASPLVTNLDKNEAQASTSLPTSNEYQNEKLANELKSLLDELNVNELATGSLNTYYKRTIKISGQKAMYALKSKDFKKMSEAKYQLQKIYNEIDEALKSKY

SEQ ID NO: 645 - protein, 346 aa, Phage F87s/06
MKTRCYDGKKWQYEFKYEGKRYRKKGFRTKREANSAGLDKLNELRSGFNIDNYITLEEYFENWIKTYKQPVVKENTYRHYRNALQHIQKHKIGKMELSKINRQVYQKFINDYSKEHAKETIRKTNGAIRSALDDALYDGLIFKNPAYKVNYKAGKPTKSEQEKFISVTEYEILKDHVRKKRTRSSLALFIMICTGCRVSGARNIKIEHINQVKNTIFIDERKTDTSPRYISIAKSDMKHIMDVISTFAISYDGYIFKEAGSIINLHAINNALKSACRVNNIPIITSHALRHTHCSYLLAKGVSIHYISKRLGHKNIAITTSVYSHLLEEKFNEEDKKQLKFRKYVI

SEQ ID NO: 646 - protein, 251 aa, Phage F87s/06
LNGGESVSENKGEMMTHNIEKRINKLKTSGNPKFKKLDSDIHYLLKRFEGEKNHKGFYPKFKQGEIVFVDFGINVNKEFSNSHFAIVMNKNDSNTEDIVNVIPLSSKENKKYLKMNFDLKWEYYLRLFLNLISAQNNSAILKEVFDKKYQKNNTEFITKDYFSEFISDSLEIENKLNKIDRNINNIVSAIDKVKKLKGNSYACINSFQPISKFRIRKVLPQKIKNPVIDSSDIMLLINRINNNILQIPDIR

SEQ ID NO: 647 - protein, 60 aa, Phage F87s/06
MKITNCKIKKETIVYEVLTSGNQPFTYELPKDLSSHNARKYLEFISQKIDGDKLTKEDSL

SEQ ID NO: 648 - protein, 61 aa, Phage F87s/06
MSTYKEIEHLHINTGGKELTQEQIEEAKAFIDSQEFKDMIREAKESHQRVMESKITDRTKL

SEQ ID NO: 649 - protein, 48 aa, Phage F87s/06
MDFKEVDINIEEWEMVEIPFYTEEELTYRLNNGLPITKSELEEQESKK

SEQ ID NO: 650 - protein, 284 aa, Phage F87s/06
MKPRKQDEKILSDQYSYFEPIISDSCDIKFDENKRRMGSIFISHEEICFIRKEEDYIFKISLSEVIDYNTVVTIWKNQAFLTLNDNRKLTVYFVTNSPLTGFISILKTYMQLSKNKETIISNDCLPINDDEQTKVEIFDVVGLNYEGRRKELKKLIKKMKNNDDFFFLYSDLKGNELKEELLYEDKVYEISDYEVIPGVFLQKEPDNPYDENAIKVMISNEYSEFHVGYVPREYASRLVNHMDNIVSCNAYINGGKYKTLDYLEEKIVTKESDYGLRVHLEYKV

SEQ ID NO: 651 - protein, 238 aa, Phage F87s/06
MNSFKDRLKQIMSERKISQSELSRRTGIGRNSISDYLNGKYEAKQDKVFELAKALNVNEAWLMGFDISKNRKIENNDITSIYSKLTPPRQSNVLKYATNQLEEQNNDSDNLVDFNSYIQEKSEVDIYGCASAGIGERLYNEPISKEFVRGYVPAHDIALKVNGDSMEPLFKNGQIIFIEKSHTIKDGQIGVFIINGDAYVKKVYVEDNRLTLVSLNKKYKDLYFYDNESVRLVGKVIL

SEQ ID NO: 652 - protein, 80 aa, Phage F87s/06
MIYNFDYSLLYERMAEYRYSQSSLANAIPISRTSINHKLQGKNLFTQWEIKRICELLEIPPTKVGRYFFEQNVQKPVQMS

SEQ ID NO: 653 - protein, 42 aa, Phage F87s/06
MEQITLTKEELKEIIAKEVREAINGKKPISSGSNFQQSKNQP

SEQ ID NO: 654 - protein, 125 aa, Phage F87s/06
MARNQSVQVLIFNKVRISHNDFDEINKKFAYTERLRGADNLGLGHPLSLKKYQHGIGCYENYKAYASEIHDHIRKLTLSAFGVTLNSDLKESEYDEASRMYDMLKNFYLYRYQKRIETLSIEDFE

SEQ ID NO: 655 - protein, 46 aa, Phage F87s/06
MLQKFRIAKEKNKLKLKLLKHASYCLERNNNPELLRAVAELLKKVS

SEQ ID NO: 656 - protein, 69 aa, Phage F87s/06
MKLLVTLKDGSKKHVSDLKKIVFPGYEGIETVTKEEIETFFLDPTKTYVFVGSQTLSVEAGQILTVEFS

SEQ ID NO: 657 - protein, 249 aa, Phage F87s/06
MQALQTKSNIGEMFNIQEKENGEIAISARELYKALEVKKRFSAWAEINLKHFKENRDFTSVLTSTVVNNGAVRQLEDYALTLDVAKHVAMMSGTEKGFDFREYFIQVEKAWNSPEMIMQRALKIANNTINQLETKIERDKPKIVFADAVATTKTSILVGELAKIIKQNGVNIGQRRLFEWLRQNGFLIKRKGVDYNMPTQYSMERELFEIKETSITHSDGHTSISKTPKVTGKGQQYFVNKFLGEKQTS

SEQ ID NO: 658 - protein, 86 aa, Phage F87s/06
MEQITLTKEECVEQCINKDLKLLDYRVQQILEGVLSESTTYGDARNKLETLKIIAESHFKTEHASVIYKLALKKLDKKINATPIKE

SEQ ID NO: 659 - protein, 45 aa, Phage F87s/06
MFKILNDIKTSLKNHPWGWKEHLPYLLMLTLSLVALIFGVLSAIL

SEQ ID NO: 660 - protein, 109 aa, Phage F87s/06
MIEMPHVLNVTVPIPETHVLITKDEYEELIAYSLDPVWNMSDLKKKLKIASDETIKDRLLFHPRFEKELRAQGIVHYPDENFNRWRFNARKMNKFVDEHFNEIYKERIK

SEQ ID NO: 661 - protein, 53 aa, Phage F87s/06
MSKTYKSYLLAVLCFTVLAIVLMPFLYFTTAWSIAGFASIATFIFYKEYFYEE

SEQ ID NO: 662 - protein, 86 aa, Phage F87s/06
MYYKIGDVCQKVINVDGFDFKLAVKKQDYSILVNVLDLEDRFIDSINITDENDLYTALDILNQSIYEWIEENTDERDRLINLVMRW

SEQ ID NO: 663 - protein, 92 aa, Phage F87s/06
MVGISMRDTERNILNIFKTLFDEYTLSNQRALLEIERNHHGYLSINFLHYHDSYKTNNKLVQIHEINPDSHERIKNLIIEVLRGHRKIKKGA

SEQ ID NO: 664 - protein, 649 aa, Phage F87s/06
MEIKINKLTISNFAGIKEESFNFNGKDAKIYGNNATGKTTTATALQWLLFDKGLDGSTKSFNPVPLNEKNEENYELIPTVFAEFEIDGKITTFKKESHPKYTINQKTNRKEYSRSRTKKQYINDESIKVKDYKARIDELIDEDVFKLITNPQAFNLLDWKKRRSLLFEIAKPINDEDVIKTNDDFKELNNILGDHEIETKKKILTDKIKQINKDIKDIPIRINQTQQNKQDVPEFDNDRYAIIKQEIEQLENERIDIQNGKEEINLRNQLADKQSELKRIEDNNSASNENKIHALTNELHVENGTVANLKTRLKQNKQQITHEENRRNQLLENHKGLKSDLEKAKNQKFEYLDDNVCSCCGQQLPAEQVSEVREKALQKFNANKSKELETIQTSINHIISEGKKIKPIIEKLEDDNNNLQIKINEAEERSARIQNKINKLKTTHVDVTQTDEYKAVMLEINEINQKRSNIRKTIQDKVSGIDDKISELTQEKSEIEVSISIEKSNKHLDDVISELRNEEDRLLDEKEKYSHDLYILKEFTTTKVKMLTENINNEFDIAEFKLFNTLVNGELEETCSTTVNGVEYDSGLNNASRINVGLDIINTLSKHFKVTAPIFIDNAESVTELIKTESQQIQLIVNEQDKKLRMETI

SEQ ID NO: 665 - protein, 306 aa, Phage F87s/06
MTENNKLQTIEQQLVQEKNVSDNVLNKVRVLESQGNLELPNDYSPSNAMKQAWLQISQDNKLMSCNDTSKANALLDMVTQGLNPAKNQCYFIPYGNKMQLQRSYHGNVMMLKRDAGAQDVVAQVIYKGDTFKQEMGETGRIKAIKHEQDFFNIDKENIIGAYCTIVFNDGRDNYIEVMTIEQIKQAWMQSSMIKDEKALQNSKTHNNFKEEMAKKTVINRAAKRYINTSTDSNLFKYAQESEQRQRKEVLDAEVEENANQEQLDFEQPVLEEAQYTELENDKPIDVSDFEEIKEPATEKESEEEPF

SEQ ID NO: 666 - protein, 117 aa, Phage F87s/06
VAFLLQSTLGYKVLYVTDTKYLKYKFNGITHMMLEVNYIYEQMQENIKNGSVHSTLANRIMESHFSLEHAIGMLKANDLTRLEEIHLIHLSSQNSNAKYIKSEIQKVTGAPVYFGGL

SEQ ID NO: 667 - protein, 156 aa, Phage F87s/06
MLNRTILVGRLTRDPELRTTQSGVNVASFTLAVNRTFTNAQGEREADFINIIVFKKQAENVNKYLSKGSLAGVDGRLQTRNYENKEGQRVYVTEVIADSIQFLEPKNSNDTQQDLYQQQVQQTRGQSQYSNNKPVKDNPFANANGPIELNDDDLPF

SEQ ID NO: 668 - protein, 297 aa, Phage F87s/06
MTGWISIDRSIQNHWLFKEKRTFSKFEAWIYLLMEANHSEAKVPIGNQIVTVERGQRLTSILTLSDLFNWSRFKVKTFLDLLESDGMLEVKTTSKYTLITIVNYDFYQSEQGRNQHQNDIKPTSKQHQSNINPTSKQHQTNTNNNDNKDNNEKNVNNEKKKVTAFDFFQDNGFGFITPYNLDDLNYYLDSFENDSDEIVTASLKIAKDRNKVTWGYAKSILNTWLNANLKSIEQVRAFEKQQLESKKQNYKPFVKQSKEKTPKWLTDSTRETKTPEVDENLEKDREAFIKRLNSKWE

SEQ ID NO: 669 - protein, 72 aa, Phage F87s/06; identical to SEQ ID NO: 602

SEQ ID NO: 670 - protein, 102 aa, Phage F87s/06
MPTKYTEHKKYLQNQMPKLNLENALKIELEFYFTPPKSWSKKKKTQAIGQLKVTKPDIDNLMKTVLDACNNYLWKDDNQIAEITSSKRYGIEPKIIIRIEEI

SEQ ID NO: 671 - protein, 122 aa, Phage F87s/06
MARKARIVTINDKPYRFTKSEMELIESHGITAGMVSKRVKDGWELHEAMDAPEGTRLSEYREKKTIERLEQARLERKLERKRKKEAELRRKKPHLFNVPQKHPRGRYACYLMENDIFVKVKK

SEQ ID NO: 672 - protein, 80 aa, Phage F87s/06
MTDNARKEYLNQFFGSKRYLYQDNERVAHIHVANGNYYFHGHIVPGWQGVKKTFDTAEELEIYIKQHGLEYEKQKQLTLF

SEQ ID NO: 673 - protein, 33 aa, Phage F87s/06
MQDALKEDIGLDEAVGIMTGQVVYKYEEAQENE

SEQ ID NO: 674 - protein, 178 aa, Phage F87s/06
MNNTLTIDQLQELLQIQKEFDDRIPTLNLRDSKIAYVVEFFEWFNTLETFKNWKKKPGKPLDVQLDELADMLAFGLSIANQVGVSSEEIKEAIESSFKDTEFHKMFNFKDKEFAQDAVVSTPQIIFKEFYPDQQAIVIVIDIAYNLYSIDQLIDAYKKKMKRNHERQDGTADAGKGYV

SEQ ID NO: 675 - protein, 81 aa, Phage F87s/06
VSDMLEIFLIGFGVYLFYRIAIIFLKSKKTIHTNIYEMLMLATIFMISTFAYKHQKTHILIAFLVMFFMSKLKQVQGSYEE

SEQ ID NO: 676 - protein, 68 aa, Phage F87s/06
MTQYLVTTFKDSTGRKHTHITKAKSNQRFTVVEAESKEEAKEKYEKQVKRDAVIKVGQLFENIRECGK

SEQ ID NO: 677 - protein, 128 aa, Phage F87s/06; identical to SEQ ID NO: 611

SEQ ID NO: 678 - protein, 49 aa, Phage F87s/06; identical to SEQ ID NO: 612

SEQ ID NO: 679 - protein, 66 aa, Phage F87s/06; identical to SEQ ID NO: 613

SEQ ID NO: 680 - protein, 138 aa, Phage F87s/06
MIKIEKHDIKKLEEYIQHIDNYRRELKMREYELLESHEPDNAGAGKSNLPGNPIERCAIKKFSDNRYNTLRNIVNGVDRLIDESDEDTLELLRFRYWDCPIGCYEWEDIAHYFGTSKTSILRRRNALIDKLAKYIGYV

SEQ ID NO: 681 - protein, 99 aa, Phage F87s/06
MMTKDERIRFYKSKEWQTTRKRVLERDNYECQQCKRDGKLTTYDKSKRKSLDVDHILSLEHHPEFAHDLNNLETLCIKCHNKKEKRFIKKENKWKDEKW

SEQ ID NO: 682 - protein, 126 aa, Phage F91a/06
PPSYNHFKAGDEMEIIVDENLVLKEKERLQVLYKDIPSNKLKVVDGLIIQAARLRVMLDYMWEDIKEKGDYDLFTQSEKAPPYERERPVAKLFNARDAAYQKIIKQLSDLLPEEKEDTETPSDDYL

SEQ ID NO: 683 - protein, 528 aa, Phage F91a/06
LISLIIYKQHIYSRDDVYFDEQKIEDCIKFIEKWYFPTLPFQRFIIANIFLIDKNTDEAFFTEFAIFMGRGGGKNGLISAISDFLSTPLHGVKEYHISIVANSEDQAKTSFDEIRTVLMDNKRNKTGKTPKAPYEVSKTEIINRATKSVIRYNTSNTKTKDGGREGCVIFDEIHYFFGPEMVNVKRGGLGKKKNRRTFYISTDGFVREGYIDAMKHKIASVLSGKVKNSRLFAFYCKLDDPKEVDDRQTWEKANPMLHKPLSEYAKTLLSTIEEEYNDLPFNRSNKPEFMTKRMNLPEVDLEKVIAPWKEILATNREIPNLDNQMCIGGLDFANIRDFASVGLLFRKNDDYIWLGHSFVRQGFLDDVKLEPPIKEWEKMGLLTIVDDDVIEIEYIVDWFLKAREKYGLEKVIADNYRTDIVRRAFEDAGIKLEVLRNPKAIHGLLAPRIDTMFAKHNVIYGDNPLMRWFTNNVAVKIKPDGNKEYIKKDEVRRKTDGFMAFVHALYRADDIVDKDMSKALDALMSIDF

SEQ ID NO: 684 - protein, 152 aa, Phage F91a/06
MSILEKIFKTRKDISYMLDLDMIEDLSQQAYVKRLAIDSCIEFVARAVAQSHFKVLEGNRIQKNDVYYKLNIKPNTDLSSDSFWQQVIYKLIYDNEVLIVVSDSKELLIADSFYREEYALYDDIFKDVTVKDYTYQRTFTMQEVILFKVQQQ

SEQ ID NO: 685 - protein, 128 aa, Phage F91a/06
VTHFVESLFEDYGKIFGRMIGAQLKNYQIRGILKSASSAYDEKNIEKLQAFTNKLFNTFNKNQLAIAPLIEGFDYEELSNGGKNSNMPFSELSELMRDAIKNVALMIGIPPGLIYGETADLEKKHACI

SEQ ID NO: 686 - protein, 82 aa, Phage F91a/06
MYLKDTRIEIVGVNKKDPLQYAEAIDKLVSSGSFTRNEVRIMLGEEPSDNPELDEYLVTKNYEKANENGSTLKGGDEDESGD

SEQ ID NO: 687 - protein, 245 aa, Phage F91a/06; identical to SEQ ID NO: 620

SEQ ID NO: 688 - protein, 168 aa, Phage F91a/06
MTINLSETFANAKNEFINAVNNGEPQERQNELYGDMINQLFEETKLQAKAEAERVSSLPKSAQTLSANQRNFFMDINKSVGYKEEKLLPEETIDRIFEDLTTNHPLLADLGIKNAGLRLKFLKSETSGVAVWGKIYGEIKGQLDAAFSEETAIQNKLTAFVVLTKRFK

SEQ ID NO: 689 - protein, 193 aa, Phage F91a/06
VALETAFLKGTGKDQPIGLNRQVQKGVSVTEGAYPEKEEQGTLTFANPRATVNELTQVFKYHSTNEKGKSVAVKGNVTMVVNPSDAFEVQAQYTHLNANGVYVTALPFNLNVIESTVQEAGKVLTYVKGLYDGYLAGGINVQKFKETLALDDMDLYTAKQFAYGKAKDNKVAAVWKLDLKGHKPALEGTEETL

SEQ ID NO: 690 - protein, 75 aa, Phage F91a/06
MVKFKVVRAFKDIEHNQHKYKVGELYPAEGYNNPRVELLTNQIKNKYDKVYIVPLDKLTKQELLELCESLQKKDV

SEQ ID NO: 691 - protein, 98 aa, Phage F91a/06
MVKTMTIDDLLVKFKSLEKIDHNSEDEYLKQLLKMSYERIKNQCGVFELENLIGQELILIRARYAYQDLLEHFNDNYRPEIIDFSLSLMEVSEDEESV

SEQ ID NO: 692 - protein, 120 aa, Phage F91a/06; identical to SEQ ID NO: 624

SEQ ID NO: 693 - protein, 134 aa, Phage F91a/06
MSVKVIGDKALERELEKRFGIKEMVKVQDKALIAGAKVIVEEVKKQLKPSKDTGALINEVSFSKPEWINGKRTITVHWRGSKDRYKIVHLIEYGHVQKGTGKFIKPKAMGGVNRAIRQGQNKYFETLKRELKKL

SEQ ID NO: 694 - protein, 135 aa, Phage F91a/06
VIDILYKVHEVISQDRIIREHVNINNIKFNKYPNVKDTDVPFIVIDDIDDPIPTTYTDGDECAYSYIVQIDVFVKYNDEYNARIIRNKISNRIQKLLWSELKMGNVSNGKPEYIEEFKTYRSSRVYEGIFYKEEN

SEQ ID NO: 695 - protein, 89 aa, Phage F91a/06
MAIKHASAPKAYFNITGLGFAKLTKEGAELKYSDITKTRGLQKIGVETGGELKTAYADGGPIESGNTDGEGKISLQMHAFPKEIRKIVF

SEQ ID NO: 696 - protein, 83 aa, Phage F91a/06
MFTNPKIDGETAEKDWDFSSEEVEGEALFPLVDNKKSVRKYIFDSANMTNHDGDGEKGEEAFLKKILGEEYTGNVTEGNEETL

SEQ ID NO: 697 - protein, 46 aa, Phage F91a/06; identical to SEQ ID NO: 629

SEQ ID NO: 698 - protein, 116 aa, Phage F91a/06; identical to SEQ ID NO: 630

SEQ ID NO: 699 - protein, 42 aa, Phage F91a/06
MLKNMDTLMMDLIENGKDANEVLKMPFHYVLSIYQNKNNDIS

SEQ ID NO: 700 - protein, 883 aa, Phage F91a/06
MGERIKGLSIGLDLDAANLNRSFAEIKRNFKTLNSDLKLTGNNFKYTEKSTHSYKQRIKELDGTITGYKKNVDDLAKQYGKVSQEQGENSAEAQKLRQEYNKQANELNFLEKELEKTTTEFEEFKKAQVEAQRMAESGWGKTSKVFESMGPKLTKMGDGLKSIGKGLMIGVTAPVLGIAAASGKAFAEVDKGLDTVTQATGATGGELKKLQNSFKDVYGNFPEDAETVGGVLGEVNTRLGFTGKELESATESFLKFSHITGSDGVQAVQLITRAMGDAGIEADEYQSVLDMVAKAAQASGISVDTLADSITKYGAPMRAMGFEMKESIALFSQWEKSGVNTEIAFSGLKKAISNWGKAGKDPREEFKKTLAEIERTPDIASATSLAIEAFGAKAGPDLADAIKGGRFSYQEFLKTIEDSQGTVNQTFKDSESGSERFKVAMNKLKLVGADVWASIESAFAPVMEELIKKLSVAVDWFSSLSDGSKRSIVIFGGIAAAIGPVVFGLGAFISTVGNAVTVLAPLLASIAKADGLISFLSTKVPILGTVFTALTGPIGIVLGVLAGLAVAFTIAYKKSETFRNFVNGAINSVKQTFSNFIQFIQPFIDSVKNVFKQAVSAIVDFAKDIWSQINGFFNENGISIVQALQNICNFIKAIFEFILNFVIKPIMFAIWQVMQFIWPAVKALIVSTWENIKGVIQGALNIILGFIKFFSSLFTGNWRGVWDGIVMILKGTVQLIWNLIQLWFVGKILGVVRYFGGLLKGLISGIWGVIKGIFTKSLSAIWNATKSIFGFLYNSVKSIFTNMKNWLSSTWNNIKSNTVGKAHSLFTGVRSKFTSLWNATKDIFTKLRNWMSNIWNSIKDNTVGIAGRLWIKYVISSETCVTV

SEQ ID NO: 701 - protein, 525 aa, Phage F91a/06
MRDGLKSIIGKIKDHIGGMVDAIKKGLNKLIEGLNWVGGKLGMDEIPRLHTGTEHTHTTTRLVKNGKIARDTFATVGDKGRGNALNGFRNEMIEFPNGIRVITPNTDTTAYLPKGSKVYNGAQTYSMLNGTLPRFHFGTTMWKDIKSSASSAFNWTKDQIGKGTKWLGDKVGDVLDFMENPGKLLNYILEAFGIDFNSLTKGMGIAGDITKAAWSKIKKSATDWIKENLEAMGGGDLVGGILDPDKINYHYGRTAAYTAATGRPFHEGVDFPFVYQEVRTPMGGRLTRMPFMSGGYGNYVKITSGVIDMLFAHLKNFSKSPPSGTMVKPGDVVGLTGNTGFSTGPHLHFEMRRNGRHFDPEPYLRNAKKKGRLSIGGGGATSGSGATYASRVIRQAQSILGGRYKGKWIHDQMMRVAKRESNYQSNAVNNWDINAQRGDPSRGLFQIIGSTFRANAKRGYTNYNNPVHQGISAMQYIVRRYGWGGFKRAGDYAYATGGKVFDGWYNLGEDGHPEWIIPTDPARKK

SEQ ID NO: 702 - protein, 80 aa, Phage F91a/06
LSNVNGFDDPSLLLKMIEQQQQQIALLLKIAQSNDVIADKDYQPIIDEYAFDKKVNASIEKRERQESTKVKFRKGGIAIQ

SEQ ID NO: 703 - protein, 382 aa, Phage F91a/06
MIDTIKVNNKTIPWLYVERGFEIPSFNYVLKTENVDGRSGSIYKGRRLESYSFDIPLVVRNDYLSHNGIKTHDDVLNELVKFFNYEEQVKLQFKSKDWYWNAYFEGPIKLHKEFAIPVKFTIKVVLTDPYKYSVTGNKNTAISDQVSVVNSGTADTPLIVEARAIKPSSYFMITKNDEDYFMVGDDEVTKEVKDYMPPVYHSEFRDFKGWTKMITEDIPSNDLGGKVGGDFVISNLGEGYKATNFPDAKGWVGAGTKRGLPKAMTDFQITYKCIVEQKGKGAGRTAQHIYDSDGKLLASIGYENKYHDRKIGHIVVTLYNQKGDPKKIYDYQNKPIMYNLDRIVVYMRLRRVGNKFLLKLGNLITLKTQIDVNLLIWMRKSG

SEQ ID NO: 704 - protein, 118 aa, Phage F91a/06
MDEKEWIDGGKFYQRPASIIAIYSAKYNGYKWMEMNGLGSFNTEILPKPKGARDVIIQKGDLVKIDMQAKSVVINEEPMLSEKSFGSNYFNVDSGYSELIIQPENVFDTTVKWQDRYL

SEQ ID NO: 705 - protein, 790 aa, Phage F91a/06
VIHVLDFNDKIIDFLSTDDPSLVRAIHKRNVNDNSEMLELLISSERAEKFRERHRVIIRDSNKQWREFIINWVQDTMDGYTEIECIASYLADITTAKPYAPGKFEKKTTSEALKDVLSDTGWEVSEQTEYDGLRTTSWTSYQTRYEVLKQLCTTYKMVLDFYIELSSNTVKGRYVVLKKKNSLFKGKEIEYGKDLVGLTRKIDMSEIKTALIAVGPENDKGKRLELVVTDDEAQSQFNLPMRYIWGIYEPQSDDQNMNETRLSSLAKTELNKRKSAVMSYEITSTDLEVTYPHEIISIGDTVRVKHRDFNPPLYVEAEVIAEEYNIISENSTYTFGQPKEFKESELREEFNKRLNLIHQKLNDNISNINTIVKDVVDGELEYFERKIHKSDTPPENPVNDMLWYDTSNPDVAVLRRYWNGRWIEATPNDVEKLGGITREKALFSELNNIFINLSIQHASLLSEATELLNSEYLVDNDLKADLQASLDAVIDVYNQIKNNLESMTPETATIGRLVDTQALFLEYRKKLQDVYTDVEDVKIAISDRFKLLQSQYTDEKYKEALEIIATKFGLTVNEDLQLVGEPNVVKSAIEAARESTKEQLRDYVKTSDYKTDKDGIVERLDTAEAERTTLKGEIKDKVTLNEYRNGLEEQKQYTDDQLSDLSNNPEIKASIEQANQEAQEALKSYIDAQDNLKEKESQAYADGKISEEEQRAIQDAQAKLEEAKQNAELKARNAEKKANAYTDNKVKESTDAQRRTLTRYGSQIIQNGKEIKLRTTKEEFNATNRTLSIY

SEQ ID NO: 706 - protein, 480 aa, Phage F91a/06
MQPIVHFQYIKRDCPNVTDGTTIRYDDNGVAQALNVGPRGIRLNADKIDINGNREINLLIQNMRDKVDKTDIVNSLNLSREGLDINVNRIGIKGGNNNRYVQIQNDSIELGGIVQRTWKGKRSTDDIFTRLKDGHLRFRNNTAGGSLYMSHFGISTYIDGEGEDGGSSGTIQWWDKTYSDSGMNGITINSYGGVVALTSDNNRVVLESYASSNIKSKQAPVYLYPNTDKVPGLNRFAFTLSNADNAYSSDGYIMFGSDENYDYGAGIRFSKERNKGLVQIVNGRYATGGDTTIEAGYGKFNMLKRRDGNRYIHIQSTDLLSVGSDDAGDRIASNSIYRRTYSAAANLHITSAGTIGRSTSARKYKLSIENQYNDRDEQLEHSKAILNLPIRTWFDKAESEILARELREDRKLSEDTYKLDRYVGLIAEEVENLGLKEFVTYDDKGEIEGIAYDRLWIHLIPVIKEQQLRIKKLEESKNAG

SEQ ID NO: 707 - protein, 50 aa, Phage F91a/06; identical to SEQ ID NO: 636

SEQ ID NO: 708 - protein, 73 aa, Phage F91a/06; identical to SEQ ID NO: 637

SEQ ID NO: 709 - protein, 76 aa, Phage F91a/06
MLSTLNEIKLGQKTQEQVNIKLDKTLDAIQKEREIDEKNKKENDKNIRDMKMWVLGLVGTIFGSLIIALLRMLMGI

SEQ ID NO: 710 - protein, 44 aa, Phage F91a/06; identical to SEQ ID NO: 639

SEQ ID NO: 711 - protein, 67 aa, Phage F91a/06
LSAIFLFAQNIAKAIGYDIQVYTEQLTDGLNAILGFLVLTGVIQDPTTKGIGDSHQALEYEEPRRKY

SEQ ID NO: 712 - protein, 251 aa, Phage F91a/06; identical to SEQ ID NO: 641

SEQ ID NO: 713 - protein, 163 aa, Phage F91a/06
MLKRGLLFLTVLLLLFSFSSITNEVSASSSFDKGKYKKGDDASYFEPTGPYLMVNVTGVDGKGNELLSPHYVEFPIKPGTTLTKEKIEYYVEWALDATAYKEFRVVELDPSAKIEVTYYDKNKKKEETKSFPITEKGFVVPDLSEHIKNPGFNLITKVIIEKK

SEQ ID NO: 714 - protein, 98 aa, Phage F91a/06
VPAGYTLDKNNVPYKKETGYYTVANVKGNNVRDGYSTNSRITGVLPNNATIKYDGAYCINGYRWITYIANSGQRRYIATGEVDKAGNRISSFGKFSAV

SEQ ID NO: 715 - protein, 149 aa, Phage F91a/06 [sequence omitted]

SEQ ID NO: 716 - protein, 116 aa, Phage F91a/06; identical to SEQ ID NO: 644

SEQ ID NO: 717 - protein, 51 aa, Phage F91a/06
LVNKINKFNQYVARFIPYIATKIPIKKNIAPMIKQKSDAELLKNEVFRVRK

SEQ ID NO: 718 - protein, 345 aa, Phage F91a/06
MKTRCYDGKKWQYEFKYEGKRYRKKGFRTKREANSAGLDKLNELRSGFNIDNYITLEEYFENWIKTYKQPVVKENTYRHYRNALQHIQKHKIGKMELSKINRQVYQKFINDYSKEHAKETIRKTNGAIRSALDDALYDGLIFKNPAYKVNYKAGKPTKSEQEKFISVTEYEILKDHVRKKRTRSSLALFIMICTGCRVSGARNIKIEHINQVKNTIFIDERKTDTSPRYISIAKSDMKHIMDVISTFAISYDGYIFKEAGSIINLQAINNALKSACRVNNIPIITSHALRHTHCSYLLAKGVSIHYISKRLGHKNIAITTSVYSHLLEEKFNEEDKKTTKILESM

SEQ ID NO: 719 - protein, 157 aa, Phage F91a/06
LNGGESVSENKGEMMTHNIEKRINKLKTSGNPKFKKLDSDIHYLLKRFEGEKNHKGFYPKFKQGEIVFVDFGINVNKEFSNSHFAIVMNKNDSNTEDIVNVIPLSSKENKKYLKMNFDLKWEYYLRLFLNLISAQNNSAILKEVSIKNTKKQHRIHH

SEQ ID NO: 720 - protein, 52 aa, Phage F91a/06
MKITNCKIKRETIVYEVLTSGNQPFTYELPKDLSSHNARKYLEFISQKIRWR

SEQ ID NO: 721 - protein, 61 aa, Phage F91a/06; identical to SEQ ID NO: 648

SEQ ID NO: 722 - protein, 48 aa, Phage F91a/06; identical to SEQ ID NO: 649

SEQ ID NO: 723 - protein, 259 aa, Phage F91a/06
MKPRKQDEKILSDQYSYFEPIISDSCDIKFDENKRRMGSIFISHEEICFIRKEEDYIFKISLSEVIDYNTVVTIWKNQAFLTLNDNRKLTVYFVTNSPLTGFISILKTYMQLSKNKETIISNDCLPINDDEQTKVEIFDVVGLNYEGRRKELKKLIKKMKNNDDFFFLYSDLKGNELKEELLYEDKVYEISDYEVIPGVFLQKEPDNPYDENAIKVMISNEYSEFHVGYVPREYASRLVNHMDNIVSCNAYINGGKYKT

SEQ ID NO: 724 - protein, 224 aa, Phage F91a/06
MNSFKDRLKQIMSERKISQSELSRRTGIGRNSISDYLNGKYEAKQDKVFELAKALNVNEAWLMGFDISKNRKIENNDITSIYSKLTPPRQSNVLKYATNQLEEQNNDSDNLVDFNSYIQEKSEVDIYGCASAGIGERLYNEPISKEFVRGYVPAHDIALKVNGDSMEPLFKNGQIIFIEKSHTIKDGQIGVFIINGDAYVKKVYVEDNRLTLVSLNKKYKDYIL

SEQ ID NO: 725 - protein, 80 aa, Phage F91a/06; identical to SEQ ID NO: 652

SEQ ID NO: 726 - protein, 37 aa, Phage F91a/06
MEQITLTKEELKEIIAKEVRNAIKGEKPISSGAISVK

SEQ ID NO: 727 - protein, 46 aa, Phage F91a/06; identical to SEQ ID NO: 655

SEQ ID NO: 728 - protein, 69 aa, Phage F91a/06; identical to SEQ ID NO: 656

SEQ ID NO: 729 - protein, 286 aa, Phage F91a/06
MQALKTKSNIGEMFNIQEKENGEIAISARELYKALEVKKRFSAWAEINLKHFKENRDFTSVLTSTVVNNGAVRQLEDYALTLDVAKHVAMMSGTEKGFDFREYFIQVEKAWNSPEMIMQRALKIANNTINQLETKIERDKPKIVFADAVATTKTSILVGELAKIIKQNGINIGQRRLFEWLRQNGFLIKRKGVDYNMPTQYSMERELFEIKETSITHSDGHTSISKTPKVTGKGQQYFVNKFLGENKQLNRRNEQCKLKTKKSSITTMTKKVIDDPLIFNTTMATT

SEQ ID NO: 730 - protein, 33 aa, Phage F91a/06
MIDQRFIEMTLERHPHLKNNFYGLIDGKEFKLD

SEQ ID NO: 731 - protein, 126 aa, Phage F91a/06
MKLDHDCVRHLLLEIETNKKIGEPLTEYNFKDNVVFGKYDFETVMYALLKLEEAKYVSVKFGWEDGHIYGYTINDITWSGHEFLDNIRDNHTWKEVKKVANKTTSMSVTLLSKLAFNYLTQKFNLT

SEQ ID NO: 732 - protein, 107 aa, Phage F91a/06
MPHILNVTVPIPETHVLITKDEYEELIAYSLDPVWNMSDLKKKLKIASDETIKDRLLFHPRLEKELRAQGIVHYPDENFNRWRFNARRMHKFVDEHFNEIYKGGHNK

SEQ ID NO: 733 - protein, 53 aa, Phage F91a/06
MSKTYKSYLVAVLCFTVLAIVLMPFLYFTTAWSIAGFASIATFIFYKEYFYEE

SEQ ID NO: 734 - protein, 100 aa, Phage F91a/06
MTKNYKDMTQEEIKDLLSEKTAELYELAKEIKGESKFDILLFSSIGVIDGDYLAGSSSVIGHTFDLAYLLDSTKSYKDIVNVLQMCKSQKILGIDDDKED

SEQ ID NO: 735 - protein, 86 aa, Phage F91a/06
MYYKTGDVCRKIFNVDGFDFQLRVKKRAYSVEIVVLDHEGNSIDGLLVSDENDLYTALDILKQSIYEWIENNTDEQDRLINLVMKW

SEQ ID NO: 736 - protein, 92 aa, Phage F91a/06; identical to SEQ ID NO: 663

SEQ ID NO: 737 - protein, 647 aa, Phage F91a/06
MKINKLTISNFAGIKEEKFNFDGKDAKIYGNNATGKTTTATALQWLLFDKGLDGSTKSFNPVPLNEKNEENYELIPTVFAEFEIDGKITTFKKESHPKYTINQKTNRKEYSRSRTKKQYINDESIKVKDYKARIDELIDEDVFKLITNPQAFNLLDWKKRRSLLFEIAKPINDEDVIKTNDDFKELNNILGDHEIETKKKILTDKIKQINKDIKDIPIRINQTQQNKQDVPEFDNDRHTIIKQEIEQLENERIDIQNGAEEINLRNQLADKQSELKRIEANNSASNENKIHALTNELHVENGTVANLKTRLKQNKQQITHEENRRNQLLENHKGLKSDLEKAKNQKFEYLDDNVCSCCGQQLPAEQVSEVREKALQKFNANKSKELETIQTSINHIISEGKKIKPIIEKLEDDNNNLQIKINEAEERSARIQNKINKLKITHVDVTQTDEYKAVMLEINEINQKRSNIRKTIQDKVSGIDDKISELTQEKSEIEVSISIEKSNKHLDDVISELRNEEDRLLDEKEKYSHDLYILKEFTTTKVKMLTENINNEFDIAEFKLFNTLVNGELEETCSTTVNGVEYDSGLNNASRINVGLDIINTLSKHFKVTAPIFIDNAESVTELIKTESQQIQLIVNEQDKKLRMETI

SEQ ID NO: 738 - protein, 266 aa, Phage F91a/06
MKSAMLQLQELKGSKKDGYKPALEFATSTSIANALMDMVVQGLNPAKNQGYFIMYGDKVQFQRSYHGTMAVTKRVAGAEEINAEVIFEGDEVKYKTKNGKIVELEHTQSFGNRNTQNIIGAYATVVFKDESRNYTEIMTFEEIEEAWKQSQMVYNGVFKEDGTHRRFPQEMAKKTVINRACKKILNSTDDASLLSNQIKESEQRQRKEVLDAEVEENANQEQLDFEPPVFEEAQYTELENEKPIDVSDFEEIKEPATEKESEEEPF

SEQ ID NO: 739 - protein, 161 aa, Phage F91a/06
MTAGTQRAMDFESHRLCTIKAKQELRIGTWSILPFDIEHDANEPVAFLLQSTLGYKVLYVTDTKYLKYKFNGITHMMLEVNYIYEQMQENIKNGSVHSALANRIMESHFSLEHAIGMLKANDLTRLEEIHLIHLSSQNSNAKYIKSEIQKVTGAPVYVGGL

SEQ ID NO: 740 - protein, 156 aa, Phage F91a/06
MLNRTILVGRLTRDPELRTTQSGVNVASFTLAVNRTFTNAQGEREADFINIIVFKKQAENVNKYLSKGSLAGVDGRLQTRNYENKEGQRVYVTEVIADSIQFLEPKNSNDTQQDLYQQQVQQTRGQSQYSNNKPVKDNPFANANGPIEIDDNDLPF

SEQ ID NO: 741 - protein, 278 aa, Phage F91a/06
MTGWISIDRSIQNHWLFKEKRTFSKFEAWIYLLMEANHSKAKVPIGNQIVTVERGQRLTSILTLSDLFNWSRFKVKTFLDLLESDGMLEVKTTSKYTLITIVNYDFYQSEQGRNQHQNDIKPTSKQHQSNINPTSKQHQTNTNNNDNKDNNEKNVNNEKKKTTAFDFFQDNGFGFITSYNLDDLNYYLDSFENDSDEIVTASLKIAKDRNKVTWGYAKSILNTWLNANLKSIEQVRAFEKQQLESKKQNYKPFVKQSKEKTTQMAHRQHERNENAGSR

SEQ ID NO: 742 - protein, 72 aa, Phage F91a/06
MDAFDKYYLFDHDGNKMFSVTPHFKDGRHLVVGIKETKFNGRRWYLDDYELNTLIDNEQMELGHQTSLFEYI

SEQ ID NO: 743 - protein, 138 aa, Phage F91a/06
MRDYMEIEIKFNEVFNAPMGSPRPRFRNTGRFVQTYMPTSYTKHKAYIQGQMPKLNLERALKIELDFYFPLLKSWSKKKKSEMVGQYKVTKPDIDNLIKTVLDACNGHVWKDDNQITEITSSKRYGIEPKIIIRIEEI

SEQ ID NO: 744 - protein, 123 aa, Phage F91a/06
MARKARIVTINDKPYRFSKFEMELIESHGITAGMVSKRVKDGWELHEAMDAPEGTRLSEYREKKTIERLEQARLERKLERKRKREAELRRKKPHLFNVPQKHSRDPYWFDNTYNQMFKKWSEA

SEQ ID NO: 745 - protein, 85 aa, Phage F91a/06
MSVISNRKVDMNEIQDNVKQPAHYTYGDIEIIDFIEQVTAQYPPQLAFAIGNAIKYLSRAPLKNGHEDLAKAKFYVQRAFDLWEQ

SEQ ID NO: 746 - protein, 37 aa, Phage F91a/06
VPGWQSVKKTFDTAEELEIYIKQHGLEYEEQKQLTLF

SEQ ID NO: 747 - protein, 84 aa, Phage F91a/06
MEMMNNREQIEQSVISASAYNGNDTEGLLKEIEDVYKKARAFDEILDGMTNAIQHSVKEGIELDEAVGIMAGQVIYKYEEEQGK

SEQ ID NO: 748 - protein, 101 aa, Phage F91a/06
MTNTLTIDQLQELLQIQKKFDDRIPTRNLNDTVASMIIEFAEWVNTLEFFKNWKKQPGKPLDTQLDEIADYLAFSLQLTLTIVDEEDLEETTEVMVDLIRK

SEQ ID NO: 749 - protein, 78 aa, Phage F91a/06
MKLLYLNYIQFIFVHVMHTLTEQFVKGIDNSIVQVLIMPFLYANTYYTIDQLIDAYKKKMKRNHERQDGTADAGKGYV

SEQ ID NO: 750 - protein, 81 aa, Phage F91a/06
VSDMLEIFLIGFGVYLFYRIAIIFLKSKKTIHTNIYEMLMLATIFMISTIAYKHQKTHILIAFLVMFFMSKLKQVQGSYEE

SEQ ID NO: 751 - protein, 68 aa, Phage F91a/06
MTQYLVTTFKDSTGQPHEHFTTARDNQTFTVVEAESKEEAERKYEAQVKRGAVIKLGQLFENIRECGK

SEQ ID NO: 752 - protein, 49 aa, Phage F91a/06; identical to SEQ ID NO: 612

SEQ ID NO: 753 - protein, 66 aa, Phage F91a/06
MWITMTIVFAILLLVCISINSDHAREIQALRYMNDYLLDEVVKTKGYNGLEEYRIELKRINNDIKK

SEQ ID NO: 754 - protein, 138 aa, Phage F91a/06; identical to SEQ ID NO: 680

SEQ ID NO: 755 - protein, 126 aa, Artificial Sequence
  Synthetic
NGLVGKGVDADGWYGTQCMDLTVDVMQRFFGWRPYGNAIALVDQPIPAGFQRIRTTSSTQIKAGDVMIWGLGYYAQYGHTGIATEDGRADGTFVSVDQNWINPSLEVGSPAAAIHHNMDGVWGVIR

SEQ ID NO: 756 - protein, 136 aa, Artificial Sequence
  Synthetic
DNSLGKQFNPDLFYGFQCYDYANMFFMIATGERLQGLYAYNIPFDNKARIEKYGQIIKNYDSFLPQKLDIVVFPSKYGGGAGHVEIVESANLNTFTSYGQNWNGKGWTNGVAQPGWGPETVTRHVHYYDDPMYFIR

SEQ ID NO: 757 - protein, 122 aa, Artificial Sequence
  Synthetic
RWYQGRYIDFDGWYGYQCADLAVDYIYWLLEIRMWGNAKDAINNDFKNMATVYENTPSFVPQIGDVAVFTKGIYKQYGHIGLVFNGGNTNQFLILEQNYDGNANTPAKLRWDNYYGCTHFIR

SEQ ID NO: 758 - protein, 122 aa, Artificial Sequence; identical to SEQ ID NO: 757
  Synthetic

SEQ ID NO: 759 - protein, 122 aa, Artificial Sequence; identical to SEQ ID NO: 757
  Synthetic

SEQ ID NO: 760 - DNA, 43016 bp, Phage F1245/05
cgggttcgatgtaacaatcgagcctattgcacaagacaaatatttcttagttgattcaaaacaaattcgtgagtaccgaggttaacatgtttcttaaattatttattgctatatacacagaacaacatctaaatgctgccaaaaacgagcttgagcgtttagggtataagtgtacaagtgatttccatagcgcattagatcaacctgttacacatattactacatatcctaacggcacatacacaatatggacgcttgatcttgatatgtgtcgtcgtttagcacgtgctaataccacagtacgtgttattaatctccgtcagttacgtggtgtacatcgtcgtttacgtacctcatttagccaagacaatcactctaagcttgagattgtacctgtacgctctgttaatatcttccctgaacttgagaaactaagcccgttagagacggaagcaatgcaagctgcgattaagtggtcttctcctaaagtacctacacctaatgtattctttaagctatggtataacacagcgattagctggaccaaagcaattgttaaccgtttagttcgtcactttaaataaggagctgttgtgagtaagatcaagatgaatgaataccgtggtaaacctccatactctatggatgatcttgctgaggaccctcaattagaacgtcgttacattcaacgtgaacgtcgtaaccatgttaaggagcgcgaccttgatcgacgtaacaaacgccaagccaagcgaaacgggtattagaatacctgtacgtatcaagatcaagtcagtcaagcactactgtaaggttgtacagtgtttaaaggattatggtgtgcaagtacctgctgaacttgcggatgaattaaacctcagacgcaataaggagtactgtaaacgtgcttgggtatggataggtactaatgatgtggcgtgggtgtttggctcttataaaatagttaaatttgctaaggtgatgacacgtaaggagtacgtaacgtggcgacaatccacagctctgaatggttagatcaagcaaagaaagtaccagtaggtcagaagcgtcgtgtataccatggcgctgagatgacacctgctatggatgtatggaacaatgaggactcatggagttgttattgtcaccgttgtcatgcaggtggtaaggtgtataaacagttcctacaacgtgttaatcctgaacaaccagtataccgtaagtacttgaacactaaagacttaataactattgacgagttatacagtaccgataagctcaagtacaaacgtcttatgaagctcttacatgataagggtatgagcatgataaccattgcagcattgaagcctatgtacaataaggttgatgatagacttgtgtttagattcaaaggtgttgatataggtcgtgactgtactggtttacatggggctaagtggttagtgtatcattcagataatccaagcgggtacgtgtacttgcaaggtaaaaatccatattgcacacgagagcctgttatcttgtgtgaggatttattctctgctcagaaggtacggtactatactggatggtcttcattgtttcttatgggtactaactttaaagacgagactgctcatttcttaatgagtagattacctgtgatagcaactgatggtgatgctgctggatgggcagctagaaaggttatacgtacacggtgtgagatgtttaatatacctgtgcaatctgtggatgttcctgtaggtcttgatcctaaagatatgaagcctatggaacttattaatttatttaaacacttggagaaccctgatgggtagtaaatataatcggattaaattccgtgtaagtcgtcgcagtgagtggttactaggtatccaacatgccgagaataatggcttccccgttggccctgaccatgaatggaagattgaacgttatcgtggtggtaaagcgctaattaatgtacgtcttgattataatgatacaggtttaaaccctgagtcttggtatagtacacccataggtactgcactatgggtggataccctaggagactttaaacatgcagttaactgtttctgtcacgatggttacttagacgttgataacttaaaggtggtgtaatatggctataataagaatcccaattagaaccgaagcagaggctaatcaattcatctctattgtgaaatcgcaagggttagcactacccgatcttgatgtagttcatcgtttaggcttggctactgcacgtgtaggtagtgatgcctgtgtttggacaggtattgaacagtacataggtacacgtcatgatttcccacattctgatgagactgtaacagtaaaccaattatataaacgactacaggagcgataatgtcagatttgaacctactccgtgtaatgatggagcgtaagcagttcacaggttctttcaaatcaatcccgatggatttatacgatcctcacacagtcactatgcttggttggtttaagttgtactacaagagttatgaagatcatgagcgtattgatgttgatacgcttggttctttaattaaactcaagactaaaccacacgaagataaggccaaacgtgacgctcagacagctttaatgaatgagatgctacgtaacctcaagcaaccgcttccgttggatatacgagcaaccacgctgaatgcgcttgaggaaagacggcttagtgctgaggcagctatgatctgtcgtaagtacgatgaaggtgaagagattgatgtaatctttgaactgaataagttagcgattgcaactaagcaacgggttgaattacagactcatgcagcttggtgcgatacggatgtttgggaactcattcaagccgatgcagatgatgcgggttatgtgtttgacttcttaccagaggagttctacacaaacattaaaggtgtgaacgagggtaacaacatcggcgttgctgcacctacagacaagggcaaaacatccttccttgtacgtgtcgctgtaagcttcgctaagcaacgttttaaacgtatgcagaatgatgactcaatgaagttccgacctgtcttatacctcgttaatgaaggcacagcagaggttattacaccgcgtgtatatcagactgcgcttgagattaatcgagagcagatgtgggcacgcggtaaatctggtacgatcacccaagactatattaatgttatgggtagaaaagatgctattcgcttaattaacattcatggtaaatcagtggcacaagtggcccgcatcatcgaatcacatgatccattcttagtgatctctgacatgactggacgtattaaagctaatggcggtgcaaacggtagtaatgatattgcacagctggaagaagtctggaatgatatgcgtatgcttgcagcaatgatgaacttcatccatgtaggtacagcgcagattagtgcagaagggtttgataatctgtacccaccattgagtgcattacagaatagtaaaacaggtattcagactacgttagacttaggtatctggattggggcatacgttaaccctgcaccagagaatgaagatttacgtgggattagtactcctaaaaacaaactggtcaagagtggtaaacgaagttacaacacagtgatgacgaacttcttacctgagacaaataattggaacgcagtaggatgaaatttaaacgcggcgatatcgtaaaggctgtaatgactggtggttgttacagcataacttctggtcaaatgtatgaagtacttgatgtacgagcaggtgggaacattaacattaagccgagtcgtgggccttgtaattggtccaaatctcatcgttttgaattggtacgtagtaaagaagatacagtaggagtgcaaccaactatgaatattaaattatatgatacagtcgttcgcacaaccattagccatcatttaaagattggtgagaagtacacagttacaacactatatccacagagtaatcatatcgctgttgagggttttccgaatatgcgtttcagtgctgctgactttattgttgtacctgaccttgaagatcgacctaagtcattagggtttgataaggtatgtgctgcattgaaagatggtacacccctacagtacttcttcaatgagaagtgggtggatgtcgtacgtcctgatagtatcagtataggtatgattaataaaagtatctggcgttatgcaattaacacgattgactactatggacaggaaatccctgcacctataaagcaatatcctagtactggccttgtgtatggtatctcattgactaagcatgaagtctataaatgcaatgtgaacaaacgtctcgggcaattgcactataagactgctgaggatgcacacgctgtactcacaactatattagcgccgtttggtatcacaccgaaggcacttgatttctcacttacacaagaggttatccaatgagtttacgtgaacaagtacgtaagtacctagatgttactaaatcacctgtacaacttgttaagcacatggatgaggtacttgagaagaacatcaagtaccctttaatagctcaacataagtacgacggtgtatacgtcctagttgctgtgactgatggtatccctacgttatatagtcgcacaggtaaagagtgttttgaaggcctctataatactgactttgtgatgagtttaaatggtatcactgatggtatatacattggtgagttatgtaactctaagtttagtcttgaggtgttcaatggtcttgtgagtactaaccgtaagaaaagttgggaagatagtgagtcacaagatactatccagttacttgaagagcatacattcattatgttccatgattacatattccataactgtttattagaaggtcattgtaaacttccttattgggcacgttatgatttactacgtaagagattacgtgtcgcagaactactagattaccttgttgtatccgacgaagtgaaaagccgtgaagatgcagatgcctatgcacaactgattattgatgtaggtggtgaaggtgctgtatttaaacatccagcagaagagtgggtagcaggtcataaaggttatcgtacaatgaagattgtgcgggacttggtacttgatctgctatgcgtaggagttgagtatggtaagggtaaacgtgaaggtcaaattgctaagcttaaattctcttataagggcagtgtgttctccgctgacttgggtaaggggtggacggacgagaaacgaaagcaactcacagagcattatgaaatctaccaaagctatgaaccagagatacaaccagcaatcgaagcatatacacctgtaggtaagatttgggaagtcaaagcccttcaagaatcaagtacaggtaaggcattacgattacctaaagtagttcgagtacgcgaagataagacagaacctgatgcgtaacacaatcttacacaaattgatctaagtacttgatttaatgtactaaatcattgttattatatgtaacataaacctttaaaattgtagatttctattaatataagtctatgattttaaaggtaattattgaatgctacatgtataagatagatagattccagattggagattatatgtcacagattaattggttagtactagactttgaagtacagaaccatgatcactatggatcattagcaagtccacatcatccagataactacttagtagcaactggttggtcggaagatggtaactctgttcaagctgaatatcatcatagtaaagatgaacagtactgtaaacgattcgctgatgcattaagtagagctaagaatctagtagctcataacttaacattcgaattacactggttgatgaaagtatatcctaatgatttacaagcattcattaatcgtggaggtagattcttctgtacacaatacgctgagtatatcctaagtaatcagattgaaatgtatccgaacttagaagacacagcacgtaagtacggagggtcacctaaagtagatgctgttaaacttctatgggaacagggtgtattaacagcagatattgatcaagcattattaatgacgtacttagctgctgatggtaagaatgaatggtctaatccagaagacccatctttccaaggtgacgtagcgaatacacgtagagcttgctttgcacaagtagcggagttacgtaagcgtggtatgatgggtatgtttaaagaacgtatggattcattgttgtttaatgcttgggccacttataacggattgtatgttgacttacctactgcacagcgtaaccaagctgaacaggagaaacaaattgctcaaattaaatctgatattcttggtatgttacctaatgatttaccagatgatttggacttctcattcacatccgattatcacagatcagcgttcttgtttggtggtacagtcaagtacaaagcgaaagtaagttatgatcctattaagtacgagcaaatcgaggtttatggttggatcggacccgaaggtaacacctactacttagccgaagatgatcccatgttacttacaggtgaatttactcagattgtttttaaagcaggtaagaacaaaggacaacctaaagtatttaagattgactctgatgtggagaaacttaaatggggtgagaaagagttcaagttcaaaggtcttattgatttcaattcactacctaaaattgttgcagatgcttatattggtaagcgtgcagagttcaggggtaaacgggatttagtagatggtacacctgtatatagcacaggtaaggatagcttggatgtacttgcaaatcatactgaggttgcaaaaccattaaagctcttggctgcgttgattaaagatacaactacgtactacctcacagatgacggtaaggggatgttgaagttcgttgaacctaatagcatcattcaccaccaactaaacaactgtgcaacgattacgggccgtttatcgggtagtaagcctaacatgcagaacatcccgcgagatggtacatcaaaagttaaagagatgtttagttctcgctttggtgaacaaggtcgtatcgttgaggtggattattctgcacttgaagtagtgacactcgctagtatttctggtgataagaacttactacgtatgttgattgaaggtattgacatgcactgttatcgcttagctgcaaagcttggtgaggactatgaaagtgtattcgagaaatgtcataacaaagatcatcccgatcataaacagtacaaacaatggcgtacagatattaaacctcgtgcctttgcccaccaatacggtgcaagtgctgagggtattgcgtactcaactggttgtacaccagaggaagcttatgaatttaaacgtattgaatttgaactattccctgaatctaatgagttccctgctaaattcgttagaccgatggtcgaaaagactggtctagaaggattacctaaacgtgaacaaaatccagaaacaggtcaatggtcattgtaccgtcaaggttatttccaagctaaatcgggtacatgttattctttccgacaattcgagaaacgcgtcgaaggtcagaagatcatggactacaaggacacacagattgctaactactggtgtcaaggtgaagcatcattcattgtgcaagctgcttgtggtcgtgtcatccgtgagcttattaagcggaactttgctgatggtttggttcttcctattaacactgtacatgatgctatttatttagattgtgccacagaagaattagctaaggaatatggtgcattagttcgggatattatggagcagacacctaagtacttagcagaagctatcccagcacttaaagattggaattaccacattactcctttccctgctgctgctgaattcggtattaatatgatgagtaaacaggacgtataatcattctgtactcacaactcaattattctattaactcattggagacatatactatgacatttaacgcacttgaactcgtacaaggtattgacacttctactttagctgacatgactgacactacaacaggtggtggttctaaacgtggattgttacctgctgggttcgcttttgctgtattcagttcttacattgaatacggtaaacagccacaaatgtttgatggtaaaaagaaagaccctgcattagagttccgcttaggattccacattgtaggtggtgttggtactaacttagcaggtgaggatgaagattatgtacaggacgggttcttacctacaatcagtacatgggatactgctcaatcccgtaatgagaaatctaaggcagttaagtactttaacgcaattaacatcgtaccaaagggtacacacttcattcagaaattaggtactatgtacttggttgaggttaaagtaactaagaacaagaagactggtaaagatcagaatgagttcgactttacatcattacagcaagcccgtgatcaggcaacacgtaaagcatacacatcctacacaaacgcagcgggtattgaggttgctatgggtgaacttaaaccagaagactacaaagtattcctatggaatcgtccaacaaatgtgactatagagcaatatcaagctatgtgggatagtatcgagattaaaggtgagactgagatcaaagatgctgctggtaatgttactggtaaacgttctaagaacttcttacaagagaagtgtcaacgtgcattagactttgaaggctcaagtttacaacaacttattggcggtgtagctttaccaagcattactgcggacgatgaagccgaacctgaacctgctgaggaacttacacctccaccattagatgacgaagctgacttagttgtaccacctgcggatgaggaataatcatggaagatactaatcgtgcaacgggtcgtactacacgtatgatccttaaagctgtagagtacttaatcaaacatccaaaaaagactgtgcgtattgtgtgctataacaattacggttgtgtatggatggctgactatatcaaatcaattgtatctgataggttatggcaacgcattgagttggcgacttatcagcactggcaatgtagtggtataggtaaacgggatgattacttctttgatcatcactgtttctaccatgaggtatataacttaaacaaccgacttaaagaagttaaagctcaactagagcgtgctgagaaggactaccgcaaatatgatgcctaatctaagtcactttgggttagacgctcagacacttagtgatcaaagcacattcaagccaagtaaaggggatagcaatatcctcctttacgatggggatggtggttgctatcagtctgctgctggtgctgcaaagcaagaaacagctatgcgtcgctttgaacgggatatccttgagaacatgtttctcgctggatgtacaaaggcccgtgtacatttaacaccaagcggatgttttaagaacggacggcacttactactaggtgctaagaagtatcaagacaatcgcagtaataagaataaacctcaacatcttgagtatctacgtagtcctgcatctgtagagtacttcaaagatcatgaagatattgagataatccttaactatcgagttgaagcagatgatgctctaatgatggatcattatagatatcataatggtatcttagtgagtcctgataaagacttaaacatctcaccatttaaatcatataaagccgagttaggtaagcacttagttctacccgaaggtgatcgatatggttggattgatcgtgagttctggttaacacctagtcagaagccaagcagtaagatgattggtaaaggtactaagttcttcttagctcaattacttatgggtgatacagcagataatgttaagggtattctaaagctcaatggtaagctttgtggtgaaagcgctgcttttgatgcattgaatcccattacagacgagcatgaggctgtgaacttcattattgaggcttacaagaagattgaccaaaacatcattccagaagcagaggccatgtggttattacgtaaccctaatgatagtgccttcaaatacctgtcagagcataacttaaccgatagtaacttaaacttcttaaacgaatgctaccacgaacgcaagtggaaattagacgaaactgatttggagtacactgatgaattataatgaaactcttaaacgtgctgagtttgctgtacagattcttaatgctgctggttatgatgcacatattgtaggtggtgcattacgagtacaggctctaggcggtacaacaaatgatatagatattgctgtaatcaccacctttaaagagggtgaattacttaacaaggacgtaaatattttacttgaccgcttaggttttaattttaaattacagcatcaaaattcagattatacagatgactctgatttatttatagctgactggtgctcaggtgatattaaccttattgcatataatcgtagtgtgacacctacggtacgtgatctagttaatacatttgaccttagtattaatatgttctacaaggaaaatggtgttttaaaaaatgatgtgtggttgcagggtgtatgtgctgtagttcttaatcccaatcgtctaggtcataatccaaaacttaatgaacgtatcgcacgttttaaacaagaatatgatcatctagactggtcaccagtcgacaaacagcttgcaatagaggagcatatgaatgccatcctctagaccattacaacgtatatcccgacaacaattaaaaggtatcatgattgcactataccaacgtcaaggtaacaaatgtgcaatctgtggtaagcctattgactttagtattacaggtcataaagcaaattacgccgtggatcataatcatgagactggtgagattagaggcacactacataaatcatgtaactctgcggaaggtaaggtaactaatgctgctggtcgctggggatgtaagagtactgactacaatgatgttatcccttggttagagagtcttattaactatctcaagacagctcatcgtaatggtacaggtatgatgtatcctgatcataaaacaccagaacagcaaaaagatgctgctaatcttaaacgtcgtaaacagtatgcagctaagaaggctgcggagagaatgaatgcaagtcggaagtaaggttgtctgcgtttatgcaggtgactccacactaattgaaacacatggtacatatgaagtcttaggcttctctagctatgatggccctaactctcatgtagagatagggttagatggtcgtctcttgggtagttactcacctaagcgttttatgacagttgaagaagtaactaaacaaactcaggagaatttgaatgactaagaaacaccatgctttgaaaggtattaaactcgacattatgaaattatggtgggatggtaaatcttatcagcaaatcgcagaggtggtatgtaaaccttatgatactgtatacggtatcgttcaacgctatcgtgatcaacaaccgcctgtacagcatacgcgtaagcctacgatctttgttattggtgacacacagtgtaaacaaggtatagaccttgcgtacttgcattatgttggtaattacatcttagagaagcgacctgatatcattgtacatatcggtgatcattatgacatggcctcactcagcacctacgataaaggccaactaagtgcagaaggccgtcgagttgctgaggatatcaaagcaggtgataagggtatcgagatcattgagaactatattgcacgtgctaaagattataaccctcgtaaggtagtgacactaggtaatcatgaagaacgtatcgatcgctttgttaatcataaccctgagtttgaaggtcttatcggtacagataaactagcctttgctaactatggttgggaagtatacccattcttaacaccagcaaatatctgtggtattaactttgtacactttgtacagaatggtatgacaggtaaacctctcggtggtactgtgatgactcgattgaagaacgtaggtgagtcatttgtaatgggccaccagcaagtacttgaccattgtttacgttacttacctttaagcggtaaggctcagatcggtgttattatcggtgcttgttatgagcatgatgagggttataaaggtgttcaagggaatcatcatttccgtggatgtgttatgctatacgaatgcgaagatggttatggtttagttaaacctgtatcgcttagtcacatgaaagaagtttacgaacgtcgaggtactaaatgatcatagatggtactaagctgcgctgtataaatgacaaaggtcaacgtattgtcaaagaaggcagcctatatacagcttgggttagagacggtataggtatagatggcagaatctttattaaagaacataaacgttttgcattgttaattactagatttgaggtggttgaatgaagattggtttgattggtttagctggtgctggtaaagatacttctgctgtaatcctacaacgtgttcttgcagagcagggcttaaaatttgaaattgaccgttatgctgcaccattaaagaatgcagctaaagaagtgttcggtgctaactttgatgagcgtaatgtcaaggaagtggatgtgtttgttgatcaagataccatgatcgaagcatctttccgatgtttacgtcaattaggtttcactgatgacgaagatgagaaagcctctgagttattctttgagcatattggattcttggagtacttatcgccacgtctgtaccaacaattattaggtacggaagttgtacgtgctgtacgtccttctgcttgggtagacagaatccgcaggctaaatcgtaatatcattatccctgatgcacgctttgagaatgaagtaagtgattgtaatttattaatcactcgcttccagaatatagataaacctaaacatccaagtgagcatttagcttgggatttacagtttacaggtaaagttctaccagtggatacaatcaatatcaacaacgaacagggtactactttagagcttctagaggaacgtatccgtagtgtagtatcattaatcaatttcaatgaggtagtttaacagtatgtctttgtaccaacgtcagttagagcttgaagaaaaatacagtacaatgagtttagtagctggtcagcagcaaattctagatgcatttaaacagggtagggcttctgacgttggttcagggcgtatcttgttagctaaagcattcgcagcatctttagaagatgttaaggcgttgttagacaaaaagattactggtatcggtggtaagtacaagaagctacttacccttgctagtcctgatgtattagtaatggcagttctacgtgaggtggtcaatggttgtgcttcacctgaacctgtgaccatgcaacaattcctacgttctgtaggtcgtattattgaatccgaatcaatgttagcttgtatggataaagtaagtccagagtatacaagtcgtacagtgcagtatctagattcagcgggtacgaaaagtattcaacatcgttaccgtacttttttaaagggtgctgagaacattaacttacattgggatcagtggagttctgaggaacgtactggtacagctaagttaatcttaggtgttatttacgaaagtactggtctatttaaatggaaaactaatccacatagtgcaagtgatagtatgtactaccttgtacctagtgaggaattagagaagcatttcggtgaggtacaagccgctgcacgagcagtagttaagtacccgcctatgctaatcccacctatggattggcaaggttataatgaaggtggttatatcacagattggttccgtatgcattctccgatgtgtggtattcgattcatcaaacctgaacataagaaatggatcattgagggccttggaaacgctcaggctgctcctgtacgctctgcaatgaataaagcacagaatgtaccttatcgtgtgaatcatcgcgtattgacgatcctacgcactgctacggctatgcgtgtaggtattctaggtttaccgagttttgtagctgctccacaacctgagttcccattaggtttaaactggcagaaagaggatgccactgctgccgagcttgaacagtttaacttctggaaatcacagatggctgcatggtatactaatgaagctaaacgtaaaggtcgtcacatgggtatcttaggccgtattaatgagctagttgcttatgaaaacgaagaacgattgtacttccctacgttcattgattggcgtggtcgtttgtacttccgtagtaaccttaatccccagtcttctgatgctgttaagggttgtttggaatttgctgagggtaaacctcttggtaaagaaggtcttaaatggttaaaagttcatgttgcaaactgttgtggttttgataaacatgatgctgatactaaggagaaatggtgtgatgagaactggtcacaaattgaaaattttatcgataacccactcgatgtggatgcgcccgaacctgacacagcatttactttattgcaggctggattggcacttaaagctgctctcgcccttagtgacccaacgacctacatatgccatgtccctgtcgcaatggatgctacttgctcaggcttacaacatttatcagcgcttacccgcgatccagtcggatcatactacacaaacctagttgataataacacagatcaaaagtctgatatttatatgcgtgttgcagaagtagcacgtgagttactaccaaattatgttagtgacgcggttgtggatcatttctggcaattgaatgagattactcgttctatggctaagaaccctgtgatgacgtatgtatatggtgcaactttattacgttgtattgatacgattggtttgaacttggttgattcaggtgtggaacctattatggaaggacgtaaggtactctatagtatcacagcattagcaacaccagtaggtaaggcattacgtaaaggtgttgaggatactgtacctgagtctgctaagatgatgaaatacttacagaaagtggttcgtgcgtatcctgaacactgtatgcaatgggtaacacctgttggagtacctgtggtcaattgggcagaaggttctgtagtgaaacgcttattcattcgttctatgggtgtcgaagctattaccatgaaagttggtgataaaacttataatactcgtgcagcagctaatggtattgttccaaactttgtacatagtcttgatggtagtcatttatgtatgactatcaatgctttcgatgggcagattctacctatccatgattcattcgccacacacccgagtgacgttacagctatgcatggggcattacgttctcaatttgttagcatgtactcacaattcaaaatcgaggacttcttaaaattcaatgaagtcgatatcgaaactcatgaagtacctgatcaatgtaacttcgatttaaacaaagtgcttaatgcaccattcatgttctgctaaggagtccttatgttattacttattatcactattcttgttgtagtacttgctgttgttatttataaatcagagaaagaaacagtacgtgaatgtttcggcattctggttgaaggtgtcacattagccaaagccaaatcagacattctcaaagttgctaaggtatggttctatacgttaaagcttacaggtgagctaatcctagtacctttcttaactatcgcattgattttattcattattgcaggtgctacatatcgagcaatcattaagtaagttacacaaagttacatacacttatacactatatcttgaatagttatgtaagtgtatgatttaatttattaaattgaaagctacacgtataagataggagaggactatgtctgtcgataaaattccaaacttcacagaggatcagatatattggttagatagtatatttccagagaatacacaattaaccactaaccctaatgaagtatatgttaagttaggacagagacaagtaatccaacgtatcaaacaagacactgctcgtaagcgtaatgcttataatagggctaacggagggtaatatgggcttaggaagtttcttaaagaaatccattaagaactcattccgtggtggtagtttatacaagttatccgataagggtgataacatgttgcgtgacgtctttggcttaaatgcatttaaagatttagcggctggtcaagatgctcagattcgagctatggctgaacagaataaactaaacactgctaatgagattcagaatgtggtgcagtttgaggacgatgtgaatacgggcggtagctcagatcagcgtcgtcgtaaaaatagtgcgggtgcttatgctcgtgcattaaatctgaacgtctaggagatacattatggcgggagttccagagttgcattattcactcagttccctgtttcatcagtatcgtgatgacgggttattagatcgtattgagacgtatgcactctggactatccctagtgtttttcctcgtgatgaacatacgttctataatgcaaataaaaatcgtaccattgagtatgactatcagtctatcggtgcgttgttagtcaatcgactagcatctaaactagctagatcattattcccagccaatacatcctttttccgtattgactcggatgatcctagactacaacaaatttttaaagcgcgcaagcttgacagtgtaattgagtatgaaaacgctgcatgcgctcgtttattctataatgcatcttatgcacaattagtgcaagcattgagactattaattattacaggtgaatgcctactctatcgtgttaatgatagtatgcgtgtttactccttaaaagattatgtggttaaacgtaacaacgttggtgaggttctagacattgtaatctgtgagcataagttcatggaagaattagaccctgccatgaaagttaaagtaggtgttgtacctgcggatactacagttaagttatatactcgtgttcagcgtcaacttatcaatggtattacttcttggaaagttacgcaagaaatcaatgggcgtgatgttggtactaacatggtttatcgtgataagttatgtccttatatccctgttgtatggaacttcgtaaatggagactcatacggtcgtgggtatgttgaggaatacggtgctgacttttctaagttatctgatctgtcccgtgaacttatgtcttatgagttagaagcacttcgtgtgctgcatctagcgaatcaggctggtggtattgacgtggatgaggtggcgaatgcaccaaacggtactgttgtacatggtagccctgagatgcttcaaccttatgaagctggttcttatcagaagatcgttactattcgtgatgaccttgctgctgtagaggcccgtcttaatactgcatttatgtacactggtaatacccgtgatgctgaacgtgtcacagcttatgaactcaaagcaaatgctgaggaagctgagcaagttctaggtggtgtgtactcacaattagcggagtccatgcatttaccattagcgtacttattattaaatgaggtacgtagtgatattatcaacgcactgaatgcacgagagatcacacttaacatcgtaacaggtattcaagccttatctcgtaataccgagaatcaaggaatgattattgcatgtaacgaacttaacgttgtaatccctgttgtagcacagcttgggaaacgatttaatctagacgctatcgctgataagattttcttgtctaatggtgtcaatatcaaagaaattactcgtactgaggatgagttaagagctatccagaaagcagagcaagaagctcaagctgcgcaggaaggtcaactagcacaggctgctatggcccaacaagctccacaacaactaggtacggctgaatccgcagtcaatgcactgcaacaagtaatgtaagaggtataatatatgtcagttgagaatttaccagaaggtcaccctgcacgtgaagcagcacagcctactccgtcagtaacaccagcggtaacacctgctccgactacacagcctgaaccacaggttgtatatcagaacatccctacttatgacacagactcaattactgatacggctgttaatgtgtttgctacatctgctggtattgaggcatctcgctttgatgcagcattagttaatgcgcttaattatggtgatgaaaagttaattgattacacagcactgacacaaggtctaaaacctgatcaagctgctcaagctaaagcactcgctgcatctgtatttaaagatcgtgttgcacgtgagcaggctcatattcaagcaagtactcaaaaggtatatgctgtagctggttctgctgaggcatggaaagaagcatctgatgcttttaacgttagcgcacctgatcacctcaaagcaattgtacgtcaaatgcttgacaatggtgatgtggagaatgcagctaaattcgtaattgaaactgcgcgaggtacaggaatggttaataacggaacacctccaattcaaggtggtacaggtgcagttcaacaaggactcactcaagaacaatattatgctgaattagcaaaactagaaagaagcgcgggtaaccgatcatttgaaagtggtcaagttggagcagagttccaacgtctacgtaatgcgcgtatcttaggacgtaagcagggcctctaagccttgctgtctgctcacttacctaactaggagaatttatcatggctcaaggtactatttatcaaccaaacacaacccgcgatcattggggtggtgctaattccgatgtggatcagcatttagaggattacactggtattgtggattctcgtttccagtacactcaaatctttggtgctttatctgcacaacgttctgtagctgatcgctcgaatacagtgcgtgtagaccgcttcaatacatctaaagtcaaaggccgtaaggctggtgaggctatcgagtcccaacgtgtgacttctgataagttgaacgtgatcgtagaatgtatgatgtacattcgtaatcctatcgactggatggatgactggactgctcctgaccgtcttgttgaaatgtcacgtaacaacggtacagagttcgctatcgcttatgacgaagcacatatcatccgtttacagaaagcacgttcttgggtagcccctgatcatctaaaacctgcgttctctgacggtatgttcgtacctgctacgcttaaacttactactgctggtgttgcagacctagaggctaatgcttctgctcttgtagtagcacatggtaagattgtagaggcactgatcaaacgtcgtgtccctttaacagatatggttacgcttgtaactccaactgtattcactgagcttgtgaatcaccctaaactaatcaataaagattatgttgagtccaatggtgatttcgctgatcgtcgtgttgtgcgtgtaaatggtatcaacgttgtggagtgtactactttcccaactgcacctatcactaaccacatcttgtctacctctactaatgctaacgcgtttaacgcgactgctgaggatatcaagtgtgagatgatcgtgttctctaaatcacagtctttaatcactgtaactgcacaaccatttacttctaacttctggaaggataatgctgagatgtgtaacgtacttgactgttactcaatgttcactcttgatgtacgtcgtccagatacagtaggttcagtattaattactcgtgctgatacaccataattttaactggcccgcctatgtgcgggcttttgtcgtttaggagatttactatgccacaattatgtgaagcaattatcagtccagcattaactggtcaagcattagaagttggtgatcgcgcatttgaacaaggtaatacacctgctgcaaatgaccgtgtcgctacattagaaggtcaggtacaagctctcttagctttattacaaggtcagcaagctgctggtgcccctgtagctcctgttgaagtggttgctgaggaagtcaaggctccagctaagaaagctactgcggagaagtaacatgcaattagacccgatagattataaagacttttatcgtaacgcgggtttaactgagttggaagagactataactgatctaataaatacattggatttaaaagtacactctactgaggccattgttcacgacactacagttaatacagactgtaacgtcttggtcaatggtcgtcacgtggtgtatactgatggtactggtaatgcaccgccaaccgcaggtctgtatttgcttgagcagacatacataactactgaggttgatcaagaggctatagcgcagacagctactcgatacagtacaggtttattctatacacgtattcgacggtctggtgtgtggacttcttggaacaaagtaggttaattaggtaaactcgaaagggtttactttaagatgtaatccataaatcccaagcggtcgagattatatcttaaagtaaatcaatcactcattaggaggtagtatgaaattattagatgctgttaatgctgcactctcttacatgggtgagcataaaattacacgtgtggagggttctaatcaccctactgtagattctattgtatctgcaattaatcgacaacgtgctgctttattaagtacaggttggtggttcaatgaacttcatttaacaatccctgtagagacagatggtcgcatccagacacctgcgcgctctttagctatttatggtaagagtactcgtgtgtccatggaaggtgagcatctttttaatttagatacaggtagtgtttattttactgagcctgtagatgtacgtattgtacgtgatattgattttgaggacttacctgaatatgcagcacagtacagcctgtatgtggctactgcggaagtgtactctgctgagttaggtgttgataacgtagttagtgttttagatggtctggccaaagatgctattgctaatttaagacaagagaacttacgtaatcgtcgttataacccaagacgtaatgctgttcggcaatcacgttacacatggttccgtaatcgttaggaggttttatggcagttcgtgagggtacttacaaatccttaattcaaggtgtgtcccaacaaatcccacaagaacgtagtgatgggcagttaggttctcaatggaacatgttgtctgaccctgttactggtctacgtcgtcgtgctggtgtcaagttacatgcacgcttaaccaacttatcgtctagctcttatatccgtatggttgatatcttaggtgtgtactacttcatgtgcatcgatacatctactggtactatgaagatttatacctatgatggtgtattaaaaaagacgtatacatctgagtacttgaaagcagtatctaaggcgagtatccgtagtactgtatcgcgtagtagctgttatgttgttaatactgataaagtacctcagaaagttgtaggtgcaacgtctagtacgtttaaccctgcacatggcggctactttagtatccgtgctggtgcattcagtaaacagtacactattaccgttaagtggggcactgttacaaaagagttctctattatgtctgatggcggtagtgcagatcaagtaacgcctgctgcgttagcacagagattatgggcgctagtaggtacagacccgcaagttactgctgtgtttgatgtggtgaatgatggccctactgtagcgcttaaagctaaagctggtcagaaccctgcacaattatctattgaaactggtgactcaagtacctacattatggtatctaatgcgtcacgtgttgcatcacggaatgacttactaggtaatttaccctcattactagatggttacatcatggccgttggtacagagaagaactcatcatactacagatttaatgatcaaactaacgtctggcgtgaagtaggtgcttgggaaaaggattacactatcagtaatgaacctatctactggactgtagatgatacacaaaccgatccctatgtagttaaagagttagacattaaaatgcgtagtgctggtgatgatgagaataacccactacctaaattcattgggtatggtattacaggtatcggtacgtatcaatctcgtcttatcttattatctggttcgtatgttaacatgtctaagactactgatttctcggagtactcacgcactactgtcacagaagtgcttgacgatgacccgattgagattgctagtgcttctttgagcagtacacagtttgaatactgtattccgtataataaggatttattacttattgcacagaaccaacaagctgttatccctgctaacaatacagtcttgactcctaaaactgcggttatttatccaagtactaaagttgaattgagtcttgctaatgaacctcaaattgtatcacgtagtgtgtactacacgtatcaacgtggtgatgattactatcaagtaggtgagtttattcctaactcatacacagatgcacaatactataatcagaacttaacagatcatatttcattgtatgctaagggtgtctgtacatgtattgcatctagtactactaacaacatggccttaatgtcatcagatgatgcagaggtgttagttaatcaatttatgtggggtggcgatgaacgtcttctaatggcattccataaatggagattcatgctacctgttgtgtacatgcagttcctacaagaaaacactatcttctttatggacgatggggatgatgttgtagttgctacattgaacacacagttaaaccagttaactgagaagcctgtgccatacttggatttatactctatgatccctgttactaacggtgtaggtactatccctgattattacttaggtaaagacttcacagtagtactatatgacaaccgtaacttacgtcactacgagattcaaccagaggttgatggtaacattatcaaagttcctcaagatggtaatgtagttattggtttcaagtatgaatctgagttcacactgacacctccattcttaaaggatgagaacggtaaggtgattgcagggtcacgtagcacgttacataagcttgatatggaatttgttaacactggaagttttaaggttcatgtgacggatgcacgtggtgaggcttatgatggacaacacgttactgctctaacttggtcggagactgagctaggttatacgtgggtaggtcggattggtaatgttagtgtaccgtgtaaaactcggttgtctagtacagagtgttccttgtataccaatggaacaactgatatgaacttgactacatgtaactactggattcgattaaatcaacgttatcggagagtataatggcaggtaactttactgctggtgttaatacaggtatgcaaggcgcacagcttggggctaactttggcccacaaggtgcggtgatcggtggtattgctggcttcgcgttagggtttcaaacacctgactatgagaagattgctcgtgagaagtacaactcggaggtattaaagaactttgctaaaagtctatttgacacacgtaaggttcaaaatatcgagaatatgcgtacagcacaggcacttgcagcttaccaagataatctacgggtacaaggaagttcctacaacgcacagtatggtgcagccgatatgattggtagttctactacagctttaaaacaagctatggactttcaaacacaagaggctaagcgtggtgtgttgatcaattgggaaacacaggtagataatatgaataccagtattgatgctatggcaaatcaatctatggcaggcctacgtaggacaaagggcgatactcgtcaaatggactatgctggactagttaaaacaggtttagacttgtatggtcagtaccgtaacacattcaataacccgaatacatctaccactcaactaggtatcaataagattcctgataatatgtctgactttggtagctatggtaaatcaggttctatgggtggtttcggaggtagcggatcattatttggataatataggagaacatcatgccgactatggtacagtcaccagacttaatcacaccgacaatcagtcgtgaacaagctattgatcgtcctgttgaacaagacgggttaagtacatttctacaggatgttctacctaaagttaaagagggttacgatcaatatcaaaaagagaatcaagatcattatatcgcattaggtatgaatgatgaactcaaccagatcacacgtgatgtatcttggttagactctcgtaactatgagcaaggtaaggaatttcagaaggtatctagtactcaggaagcacaaaagaaagccttcactgatacagttacccgtatggcgcgtgaaggtaagaatgcagatgaaattttcgatgcaggtcgtgaatacctcacagcttatacaaactcagtttataatagtcaattgagtcctgatttaaaaaacgccttatatgaggctggtattaaagagaataccatctatcagaaattgattaccaaaacaatgtctgctgttgcagaggaacgtgaacaattcgatgctcagactcgtgtagcgggtttatatcaaactgttagtactggtctagacgatcaagaaattaatgatgcattagaggctcacgtgcgtaaggcgtatgctgctaagattgcagtaggtgttgatcctaaagaagctatgaatgcagcacagaatgaaatctcggctacatttaaattctggaatggtcagattgatccaagttcgcctaatgcctcagagcaggttaataacctacgtcgtgttatggatgttgcagctaaagaaggtatcttgagttttaatacccttggtgacattcagaatgatatgaataaaatgcgagatggtattttagagtacaatggtgttcaggctggtaataccctagatgaaatgatgtggggtattgagtctggtcagaaacagtactcacatgctgaggttgaacgtcagttgacatacgttaaccagctagagacagacggtagtattacacctgcacgcgctgcacagctacgccgtgacttacagaactttggtagcactcaatatcaaaaactacttacaggtgaaatggatcctgctcagcttgtagctaataatgtatccctacaagagtttacattcttaggtaaaggcggtgaggaagcttatagtaatcaactagtacgttattatgaaggtgctaacaatggtaatcctgtagcatcaggtcaacaaatgattcaacacggtttgaaaggtgatccacatggtgagcgtttagatcatcttgttcaatatggtactcagaagttagcttcacagttcacatcattcttgagtatgacacctgaaatggcagctaagcaagagaactttcaaaatgctcaagttgcatttaacagcttacgtgacacgtataataaactacgtgcccaaggtagtcctttaagtactcaaattcttgctggtattccagaggaacaacgtggtattgtacagcaattatttactaatggtggtagtatgttcagtgctaaccaagcattagctaaccctgtgcaaactaaccgtaaagtggctaatgtagttgagggtactaagaacattaaatgggatacggaaggtgtgggtaacaaactatttaaccgtggttctggtggtggctctagactgtttaaaggtatctctaaagatgttcaaagcacttatgtagatacaatgcaaatgatctatgaggattctaagtacgagttagcgggtgctagtacaagtgctgaccctgcgttacttgtggcttctgctactagtttaggtatgcatgttaaatcacctgcgggttataatgatgctttacttacagcgcgagcagctaaggcttatcgtaatgttacctataagggtgttactctatcaggtgactacatcggtgctgctgcggatagtatccgtgaacagattgctaagaacgctaatacagacgctagtaacgttatgatctatagtaatgctagtggtagtcaaatttatgtgcagccattgaagaaagatggctccgtgcaaaaggacactgctggtcgtactatgactgtagctttttcacaggctcaattcacacaacgtatgaaagaagcttatgataaggatgcatcacgttacaagaagaacaccagtgtatttactactattggtactgctgcacgtgagacgttcagtggtcagctaggttctgatactcgtaattacagacagaacgttcaagagtggaataagacattcacagttaataagaatggtacattaggtaatactgttatcaatggtaatatccgtgcccaaatccctgctatgacagctgtgccgtttaacggtaacgtaacgttagctaatcattggcagaactaccttaataactatgaagggtttaagactactgcgggcgttgtgaaaggtactggtactgataaagatggtttcatcattggcaatggtatcaacttatatgcacatccaaaatggaaacaacgtgctatcgctgcacaaggtaatcctcaagcgattctgaatctacaagcagagttcatggcagagaacatgcgtgaccaacaatcggtagctaagaaattaggtatccctgttgcaactgcatctccgtacaactcacgctttgtatccgctcagattctacttgctgattataaatggcacaatggtaactatagtgttatcagtgatattatgtcacaacctaactactcatccgcattagctaagatgcgtaagtctgctgcatacactcatgcaggggatgatcatcgtcgtaatgtggcacgtagaaacatgttacgtgattactatatggcaattggtaaactttaataatggagggctgttatggctagtaaatatggtgttggtaaagatatccgtactctagaggctgtgcagcctgatattccagaaaatattggaacaggtaaaggtaaaaaattaattggtacgcttgcagcggattcttataaaccgctggggcgtgctaatactgctgatttgttagtccctgagcaacaactacaggatgctaaagcacgtgaagaggctagtctgttagagacggttactgctgctgttgcacctactgcacgcgattggggtaatgctatctatgaatcttataagttcacacctgatgtattctaccgccccgatgcagatgcacaagagttcttcaatgaatatcaaatcactaatcaagatgaagtagcttatattaatgctgctaactcttacgaggatatggagtttcgtaaacgtcgcattctagatcgtcgtgatgatcagcaaaagattgcagacaatcctattacaggtattgtagctagtatgttcgatattgatgctgctgctatgttagtacctgctgtaggtgaagtagctggtgctgctaaatttggacgtattgctcaacgtactgctaatgcctctatcggtgctggtggtgcttacgctattaactctgctttagaggataagagtacccgtacacaaacagagcgtgacttagacagcttaacctttggtctagttggtttcatgtcgcctatcaaatacaaacctaaagagctagacgctgctatcactaaagagatggcagatgtagctgctcagaatactgctaaggcagatgaggtcggttccgttggtacaactaacttatttaatcatcaaatgaaagtacctatctctcaaccaattgacacatctaagttgatggtgcctgattgggctaagtcaaataagactgtagctgctctgcaatctagcgctgactatatgtaccacatcactcatggtgacatggataacgtagtaaacaagattctagcagcgccacgtacacaaggtgataacgtaccttatgctactgcacctgtacaagctttacttgaggctaagttaacatctgttgagcaagctattgagaaggctgctattgctcttaaagatactagacctaatcgcgggtttggtcgtaaagagcatacacaggctcagtatgaagtaggtgaacaattcgggcaagcaatgcaacgtcttgatcaaactgtggtggatcgtctagatgctggtcttaaagtaactaaagaggacattgccgctcttattgatgaacaagccatcccaaatgaaattaaggatattcaacgtgcttatgttaattcgggttttgccgaagaagcattatcacgtgctaaacaagtaggtttattagagaacttggacgacgctgctgcactgcactcccgtagtacgtatatgcctgtaaaacactcatgggaacgtatgaataatcttatgaagtcaggtgtaactcgtgatgagattgctacctttattggtaaacagatcaagcagatgtaccctgactttgataaggcactagctaaatcgcagaaggctaagttcgtcttgacagagaagcaactaggtttgaacttcattgagaaccaagagaaattagctctcggcttatcagaggtacagactgctggtttaactaaagatcaaatgatcacactcttacgtaagtctggtgtggatgatgagaaccttaaccgtatcgcggatgttatctataaaggtacacaagatgcaggtacaggtgttgctaaaccattccgtaaacgtatgcgttgggattttaatgctgtcggtgaatcggcaagcggtagacaattcacaatgggtgatttagtcgatggtaatgcgtatatgaatttaactgattatacacgtactatgtctaagcgtattggtcttgcccagtatggtttaaaaaccactaatgacttagaccaagctttagcagagactatgaagaatttacctaagaatgtatctgtagaagaggctagacgtttcctacagaatgtacgcgctcaagctttaggtcatcctatgggtgaggctgttcctgaaacagttcgttcattgaatactattgcaggtgctacattcctatctaactcaggtttatataatacagtagacttggtgactcaggttgctaagatgggcctattgcgtacactacctgagattaagaaaggtttaggtaatatcattaaccctatgaagaagatgaccaagagtgaagctactgacctttatgacgtattaacaggtatgttaagtactgacggtcgttggagaaacatcactacacgctatgctgatgactttgaggttacaagtggtatccatgaaggtattcagtattatggtcaaagtactcgcttcttaaacctatcggaatatgttaagcgttttcagatcggccttattggtggtacattcattagtgcatttaagaatgcagctaaaggtagtgctaaagatatcgcatggttacgtaatgatatgaagttctctgatgaattagtgcgtggtgtccaagagcaatacaagctacatggtggtgctattgatctatgggataataacattcgtatggctatggaacagaaagtcttttatgaggctgacaacctagcacatactatccgtgctggtgaaatccccgcatttatggagcatagctctgtaggtaagatcatcttcccgtttatgtcttttgcattcgctatgcagcaaaaggtactacgtaacacttatcaacgtgatggtggtgctggtattgctatgttagctgctgtgcagttacctactgctgttttagtgggtatggctaaaaatgtgaaaaatggtaaggaacctgatgaggatttagctaagaactctgttaatgctttaagtatgttaggttcatttagttatcctttagagatcatcattaatggtggtttaaatagttccagtgcgactttagcacctattgccaatgttgctacattaggtaagaaagctgctgagggtaatctagatatgcgtgctattaaaggtgcgacacctctaggtagctttactggactagatttatttattacagctatcgaggaataatatggcaattaatcagaaacaatcatactcggagtacgatgtaagtactccacaaggagacttcgctattggttttgaagactataacgaaggtgagaaggatcgtatcaatgtgactgttgatggtgatgatgctgctagtaaaggttatacagttctacgtaagaacgctttaactattgcaatgacaccatttgtgccgtctggtattgtacgcctcactcgtgaaacaaacattgatactacattctacaaatttacagcaggtgctatctttgatgctgctaacgtagatgctaactttacacaagttctacactctcaacaggaagtacgtgatcgtcaatcctacgtagagggtagagtactacctttagtaactggattagaagatgcacttgctaaggcagatgaggctagtaaggctgctcaggaagctgctgaggctgcggcagaggctgcacaacaaactcgtagcgctgacaaggttatcgatgctagtgggttaactcagcaagatattaacaaccgcctagcaattacatatccaactgcggtaggtttagttggtaagcctaacttaaaggatgcagatgtagtttatgttcagagttacagtaacatctttgatggtggtgatggttattatcgcgtgtctgcggatactactactgtagccgatggagcctatgtaattcgtattaaccctaacttaattgcaacaatgcttaatactacaggtagtgtagacgtagctcgttttggtgctgtgatgaatgcggacgtaggaccgttcattgagaaagcatttaagtacttccgtgatgtatgtttaactaaaccctataaactgaacactgtagttggtatccctgatcagaacaactatgctaagaacgtttattatttacgtggttttggtgatccagagattacagtggattgtcctagtgctgtattcacatcggctgctgcaaagttagacccaaatagtgtagctaataagtttacagctaagcttgatgtgtctaatattagtttcattggtacaactgtagctaattctgtagtatttaatggtgatcgactttacaatattaacgtacaccacaataactttaagggtaatattactatcttcaaggcgtatgttaaacgtgaagccgaacgtcagtatactcaaagtatctctattaatcataaccacctagcaaatgtatatcgcgtcattgagacagacaaggcttataatctagacttctcttacaatatgtgtgaagcttgtatcggtggtatttatgtaggtgtaaatgcgccgtgggaccctaataatatctcattaactatccaccgtaatttgtgggaaggtagtggtatgttattgaaaaccaatggcggcattattggcggtactatctcagctaactactttgagaataacacatttcatgatgcaggtattgagaaatgccttatcagtattaatcgtactggtgcaggttcaggttacgctagtggtttagttgtattgggtaatacgttctcaggtaataattccatccctgatttcgtagatgtacgttataacaaccagagtaccgagtcttctgctaccagtaagacagcgaatgttaaacccatagtattcattagtaactggtcaaatagttcacttatgactaactttgcaggtgccctgcttatcaacaaccgttgtaataaccgtaatactatgtttaatgcttacagcccgcaagagggccgtgtaacatttgcatcagggtacttagataaaacgttagctagtatgttagcaggtaatcaattgaacttattaacgttcgatacacgaccatgcttcactgctggttatatcaacacgaactttaagactcggtttgatgtgacagtattgtttaagactgctggtggtattaatacagctagttgcagttttggcttagatgtatttgtgtatacaccgctaggtgcaggtgcgccgcctaagtctaatcttaaagcagttatgtcaggctttatgcagtcagacactaatgatattattagtgtagctgctaacgagactatgaaaactgttattgcaacacctgctatcacagtagtaaataacggcgacggtacttatggtattcgcttaggtaactttactaatgcatcctcacctaattggggtgctatcactactgcgcgtattgagtatacttaccaaggtacactcattgcatcgcatacttcaacatactcgactgctaacttattgacagtcgcataaggaggttacatgaacatcgtagatcaaatctactttggtttggtctatgtgtggtcaagcctagataaattaatcatgggtgctgctgctacggcttttgtagtggcactcctacgtacacgtaaacgtgacggtaaagcttcatggattgaggctactttatgtggtatctttgctactattgctttagtagggtttagctttattgctccaatcctagtaggtattctagcaggtatggggattacaattaatcttcctgtagaccctagtgcaggtatcgctggtattgtcgctgggtttatcggttggtatggtacagaacgtactatcgaatttgtggaagataacttaggaggtgataagaatgggtaagttcatcacccttgatgagattacgtccaaggctaaggagtacggtatagaaacagccgcactccgtgctgttatggatgttgagtgtaaaggtcatggctttaattccgatggtgcacctgttatactgtttgaacgtcataaattctattatggcctacaggctatcaattggataactaaatcgaaggaatggtataaactgtaccctgacatttgtaaccctagttggggcggttatggtaaagagtcacaacaacacgaacgtctacgtagagcctctgctctaaatcgtgatgtggcccttgaatccgcatcatggggtttagggcaggtgctaggtgagaactggaaagaccttggctacaagagcttacaggacttcattaacgctatgtacaaagacgaagtatctcagcttgatgctatgtgtcggttcattaaacataatggtctaatcaagcacatccagtctaagtcgtgggcaaagttcgcgcgtgcttataatgggcctaagtatgcggataataagtatgatactaagcttgctgctgcttataagaagttcggaggtatctaatggcaaaacgtaatagtgcaagtgtaagtctaatgaacgaattacatgcagctattgcaagttacatgttagctcgtctaaaagcgagtattcctgatcctaatgcaccagtggagtatgatgaagagacaggtgaagaaatccctgctttcttcatcccactagctgcatctgaattacaggttatggtaacgttcttgaataacaacaagattactgctacacctgatgtggaacacatggctgctttagcaaatgagttcaagggtgatttagaagctgctcgtaaagagcgtgctgaaagtattactaaagtaaatgagaatgatgcattcatggcatcgttattatcataggagttattatgggccgagtatccagaattaccgagcaaactaaacgccgtttagctatgttgcttgaacgctgtaatcgctataaggataatcctgtagctattccagccgaagaacgcgaagaactatctatgatgttcgctgcgacatttaaaggctttgctgagtttgctgaattaggtatgaagtatctcggctttgacctctctgaaatccaagatgatatcgcagagtacatgcagtacggcccagctaagaagatggtacaggctcaacgtggtcaagctaagtctaccttagctgcactgtattgtatctggcgattgattcagaatccaactgcacgtattttaattgtatctggtggtgaacgtcaagcatcggatgtagctttacttattatccgtattattatgcaatggggtatactatgttggatgcgtcctgatacttctaagggtgatagaacaagtgctagcgcatttgatattcattactctcttaaaggtattgataaatctgctagtgtatcttgtgttggtattacagctaacttacaaggtatgcgtgctgacttcatccttgctgatgatattgagacacaacgtaactctatgactcaaacagagcgtgagaagttactattattaactaaagaatttgctgctatctgtattacaggtgagatcatgtacttaggtacgccgcagactaaagactctgtgtatcgctctctacctgctcgtggttacgacgttcgtgtctggtgtggtcgttaccctaccgatgaagaacttgagcgctacggggctggtgtacaggttgcaccgcttattatgaaccgattacttgctgacccttcattacaaactggtggtggtgtcgatggtactcgtggtcaagcaaccgaccctgcacatattaatgagcttatcttgcaagagaaagagcttgagtacggccccgaagggttctcactacagtacatgcttgatacaacgctctcagatgctcttagaacgaagattaagatttctgatatgattgtgctggattgtggttatgatcgcgtaccagagcaattagagtggttaggtgcgatgaataacacctttaaagaacacacggagtatagcaaagacttcactatgtataatgctgtaggtgtatcggatatcctaatcccatttgaacataaactaatgactcttgaccctgctggttcagggggcgatgaagtgtctttcgctatcggtggtgctactaactcttatatctatttattaggtatgggtggtttcgctggtggtatgactgaacataacatcgataagattctattgaagatgattcacacgggtacgaaggttctagatgttgaacagaacatgggccatggtactgtgactatgttgattcaatctcaattaacaaacctgattaacctgcttaaatacaatgaccctaaagctgatgagttcattcagaaatctggtatgtcccgtaatgaattactacctttacttactggtatcggtattactcagtactatgtgactacacagaaagagaagcgtattattaatactattagtccagtgactcgccgtcataagctagttatatctaagaactgtatcattgaagatcatgagtactgtcaaccacatccagtggataaacgtaaacagttcgcagggttgtaccaattaggtaacatcacttatgatcgtaatagtttagtccatgatgaccgagctgactgtgtacaacgtattgtagaggtgttgaagggacacttaactaaagacgctgataaggctgctcagaagcgcgtagagaacgatatcgctgagtggagacgtaaccctatgggttattcagaagacgtcttaaaacgcatggggcaaggttctagaggccgtccacgtgttataactaatcgtagaggtcgtagatgagtccagaagaaatccgcagacgcttggatacaatcaccgagcgtattgctaatgctgtaatgattgttaacttaattaaggagaaatctaaatgagtactaaacgagaagtagttgtacaagctgtagataacgctgtaagcgtcgctaaggctgttaatgctaatgctgagtacaaacataaggacaaggtcactaaaggccttgaattagctggtaacgtcctacagctattgaaattgtttaagtaaggaggttgctatggatggctttgaaagtacagttaaggttggtgttaagcatactcagtatgaggagttacgtgaccttaaacaacgtggtgagacattcgacgatgtgattcgccgtttactagatgctcacaagagtctcaagagtattggcttattagactaggagattagtatggttaatagtgcagtggtagcattagacgagtgtatttagtatcatgttgccttagattatttagatggtaagtacgttagctttttatctacgtatgtggtatggctgtgaggattactggacacagagtggaagttacctgtacgattaactagattaccttctcagatgtgagtactaacttgaatttatattttgggttagatttctgagagggtgtctcccactccaccgcagccgacttccccgtataccttgggtttgtatgaatctctagggaactagctagggtatgcttatcagttccttatcagatacacagagatacgatgcaatgcatcagtacatcggagaacatcttatcagtacgggtagagtacagcttatcagatagtatgtcaatactcttagagaattatttcagtatttatttatagttctgtttgagatacttctatacttgagtgtgcttgccttttattgtcttcatatctatatctatgtgtatacctatctagatactcttatcattctatcttatctatatctcttagtacttcttatcgatatctcttatcttatctatatagttctcttagtagtatctatagtattactcttatagttatatctatttatatctatatagttatctcttattgttctctctttatgttctttattctttattcttatacgtgtagcattcaatattattcattaatatcaataacttaaaataatagaatcgtaagttttcccgtagttatgtaaacggttgatacaaaagtattctcttatatattaataacttagcttaatttaggtaacattgtgtaactagatagaactttcttcaattatttatcaaataagtattgacacgttatttaaaccattatactatgcactcataccaagcaacgacgagttactaggttactccttaaagtacttattcagatagttctaataagtgtatcaatcgacaaggtaatacactatgaaaactttaacacatcatatagcagttcaatgtacttgtggtgctactggtcagactggcgatttcttggtagatattgagcacttcaagttaacgggtgaattaatagctttagatggtatggtctttcgatctttaaccgctttatatgcttatgctaatacatatggtttaccaactaagcggttaaatactccgatagtatatcagtcataaggctgatacacttattagaattaaatgaataaataatttaaataaagtattgacagattaaatcgaaagaattaagatgcacaacataacgagagattagctagatcactagcaagcttgatgctctaacaggttgatagctctaaggtgttaaggttatgatcttcctagtagatgatactagggtattatttaaagccattaatttaaatccgagtgtgtgacgatgtacatcttgtatgtataagcacatgtacggttgaagtgtagtgataggctcgtgggatgtactcgcaagttaatttcatatactgcacgtaaagctatgatgaatctcttagagtttatatttagctaggttggtttggatgctatgcacatcgacctagcgctaatgtaatctcggtgattacttccatcaagtccataaggatactagtatgaaattacttcttaatgttcaagagatcaacaaagcaatcgagtctatcgctaaccgtggtaagaaacttgatcatgatattcatgtagctggtgtgtcagtgttaaagcatgtcgctgaacatggtgatacaactttgcttgataagctcgttaatgcaatgcctaaaggcgcacgtaaaggtgcattctgtgagtgggcactagcgttcggtaatgtacgtatgcttgaccgttctaatgaagctgataagttagctatcgaacaaggtcgcttattcgctaaggataagactaaggaatacaatgaagttgaagctatggctaaagcttggtatgactttaaacctgaacctgatttactgactacgtttgatgctgctcaagctgttaagtctttgttgaagaagtacaagacagcactcgataatggtgcagagatcaagggcggtgatgttgctatgcagcagcttaaatcgtttatgcaaacacttaacacaatggatgagcaagtatgaaggtaaaggtgcgtaataaattcgctgcggctactagcattaactacaaaggtcattatgtggtacgtaatggtaatggtacattgactttaggtgctgaacatataaccgaagaacaggctgctgttcttaatttacaagagttttctaaggtacgtgagtggttaggtcctagttattcggtggagattattgtatgattaaacgtgttgatcctatattaggcagcttagtgcgttgtccgttctgtaagaaagtttatacgcagtgtcgctgcttatggtagcgtacattattcctcgcttattgctcactgtagccattctgattgcagtgggtatgattacactatctggatttaatcctcgcttatacgagcgtatacagccacacatgtggtgtattagtattgcattaaccatgatagggatgtggtatctatgatagatgctccgctgtacttgcaaatcattatgttcatagcatgcctaagtgtaggtgtgcttctctctttcttctgttacaatggtgactgatatgacagacacaaaagatcaaggttatgaccttggcgatgaaaacttattatctgtggctaagctagctatgcgtcgtggtgagtacctactatctgcgtgggatcagtttgcagctatggatatagtggacggtctaaaccgcatacctagtgctgatggtttaattgtgtaccttaaacatggtttatgtactaatataaggtttgaaattagtcctatggctaaccacagattacgtggttcacaggcgttggatagcttattagaactagcctatcctcagtgggatggttactcaggtaattcaacctaccctgtagatggctactatgagtatgaggggtatactgaggatggtgaacacgatgcaggtatgtatcatgagcctaatctattccgtaaccctaaacgtaaagaacttcttacgtggttagtaacctctttccttcctgaatacatcaagcattggagtgctgaataatgttaatcgttcctaaagtaaatcctaacgtcactgtcacattgaacatcggcttaggcgaatcaatcgcatggggtaaatacaagaaagagaatgcagagcatggccctgtacaatctcttgtcgatatccttgacacaccgcatcgtgtagcacgtatcttagaacgtattcaaggtatggcgtacaatccgaatcagcaccatcacgggccacatgtggcacataatagctatggtattgattatggtcatcatgtacttccaaatgttaattggcgtactgtgcaagttggtaatgaaatgacactggtggtgaagtttgaagcggttgctcgtgacattatcggtcaagtgttctaccttgcagaagaactcaaacaagactgcattgctgtatggattcataacgataccaatggcggtatcggtcagttgattggtcgctacaactatgtgtggtctggtgggtacttcaaccctgagtactttgttcacttggaggtatagcatgttcaaggaatacaactactgcggtcagtgtcgagttaattatatcaactgtcattgtcctacgcattatcctgaacgtaataaggatgatcaccacctatgaaaaagctaggtttaattgttgtgtatacggctgcttatgcagccatctctttagtccaatggttacaggatgataaataatgtttgtacttaaatcaacacatcagaaagcgcttgatgaaatcaaatctttacgtgcccaactagatgctgctgctaaaactaaacgtgagttgcaagaacgtatagactcagtacgtaaagtacgtgatacggttataaaatataatgcttgtttaactgcattatgtcagtacctacccgagggtgtttaccgcattgactatggagcagaacgtcgtagttgcagtactctccgtaaaacatctgtggtgtcatacagcacatccgtgacggtagatcataaagctgctaagatgaccaatcgcaactatacaatccaacatgaacctctagcacggacatgtaaacaggctgaattaacagcgcgcctagttgcccttgaagtccaatataatattattaatcgtgatatagttgtattggatcaaaccattaaactggctcaagcgctgtatgatgtacctaccgtatgtcattcggtgactaaacgtagcgtattatctaagcaacgtaaacgtattaaacacgagttggacttggttaaagtcgagctaaataacttatagtctgtactcgcaaatcaatttcgcatttaatagatgtaggtggtaacacatgaaatactatgataactctcaccctgaattacaagggtataaacagtttattcctgaaaatcctaatcaatggttcgacttaatgtctgctaaccgtgctgtgtttatacgtgaggataagcgtgtagatgcagatgtttgggatatgattgtacagcatcttactggcgtgtcttataaacctcacagatatggtgaaggtaaacgtcactacacagagttccaattactccaagggcatcgtaaacttggtgagggttattgtagtcgtgtttatacacacccaaccaaccctgaacgtgtggttaagttcttcgagcgttaccatgaagatgtgtgctgttacgagtacttacgtatgtgtgtacaaggtaagctaccagtgtttgattggctacctgaagtacatagtctagcatgtatcaaagttcttatccgtgaagatgataaggtgcgtatcattacttatggtgtggctgtgttccctagatatgacccaatagaatcagactatgagaagcaaaaccgattcgttcaagatggtattaatgctgagttcaagaaatatgtgcatccatatctaccgcatgcgcgtattgacctacattggggtaatatcatgtgggatcgtagacttaatcaatatgtagctactgatcctgtaatcaattcagcacctgtagaaacacatgtacaaactattgattggttccctaaagaaattagtgctaagtactcaggtgcgaccgcatgttcacgtcctaatgtaagtactcgaatgactacgcaggattatgcaggtaatacaacgcacccactagcaccacattgggctaaaatacgtgaacacgtgatgcaggtacaacattcagaagcagcgcgattagagcgtgcttggagagtgcatagacctgtactagttgaccatgctatgtttgtgcgtgagttgatgcggtgtcctaaaagccgtatgttccttagtttaaagacacctaaaccaaggctacctcaatccgctaagtacaaagtacagcgtaaggtggttaatgaacgcttaccacaaggtaagttcttgaataatttaagacaggagttacgacatggtcgtgtatggtaatgtaatctttgagcgcgatttagcgcagaccatgtataaacgtatgagttcacgactagcagatggtgtacgccgttgctgtatggttgatgaacatacattgtactttgaatcagaagtatctgacagactaagtcgtaagaagttcaataacatcctcacaggtcaacgtattgcgccgtacagcgagattaagtacccgaaggtaggtgagcatacacttatgtctgatcaagccatagcagaagctaaggcgattctaagcagtgaaacacgtacacgtagttgaggttattatgtggattttaataatgagtattgtggtgggttcttatagaggtgtgtctgcaaccacacaggagttcactagtaaagaacgttgtatggtagctgctcaaatggcactggataagaaaatgggaggtggggataactccaatagactcaccgctatatgtgtacctaaataagcttatagatagcagcattcaaacggatgctgttagtgtataagtttcctttcgctactcaatggagtatattatgtcattagctaaacaattcaacgctgctggtatccgtggttctaaacctaagtctgataaaggttggaccttcaaggctcagaaagcttatgtacgtaaccgctttgaaaatgtagagcgtgttattgcacctgtgtataaccacaaggttgagcaggtagcccgtgccatcatcgttgaaacacctttagcatctttgaatgttgtggcgcagggttcatcacttcattatgattactcacctgacacattagtccgtatcggtaagctaactcgtaaaggtgcaacgttctctgcggattctaactcagcattagctattcttggcttgaatggtgctgctgtgctgtactggttaggtggtttacgtattaacattgatgaacaacaatacgaagtcatcactaatgatggtgaatacatctatgctactgtaggtattatcttacaattggcccgtgattgtgtgttcaaccgtgatgctgtacttgcaaacttccaaggagctaaacgtgtccgcgccaaataatatctttcataagggtatgcgtgtcatagtaactaaagcagatcgtgacgatgtacgtctaggtctgcatggtgataccattgccactgttgtaggtgtacatc

SEQ ID NO: 761 - protein, 27 aa, Phage F1245/05
GFDVTIEPIAQDKYFLVDSKQIREYRG

SEQ ID NO: 762 - protein, 165 aa, Phage F1245/05
MFLKLFIAIYTEQHLNAAKNELERLGYKCTSDFHSALDQPVTHITTYPNGTYTIWTLDLDMCRRLARANTTVRVINLRQLRGVHRRLRTSFSQDNHSKLEIVPVRSVNIFPELEKLSPLETEAMQAAIKWSSPKVPTPNVFFKLWYNTAISWTKAIVNRLVRHFK

SEQ ID NO: 763 - protein, 57 aa, Phage F1245/05
VSKIKMNEYRGKPPYSMDDLAEDPQLERRYIQRERRNHVKERDLDRRNKRQAKRNGY

SEQ ID NO: 764 - protein, 103 aa, Phage F1245/05
LIDVTNAKPSETGIRIPVRIKIKSVKHYCKVVQCLKDYGVQVPAELADELNLRRNKEYCKRAWVWIGTNDVAWVFGSYKIVKFAKVMTRKEYVTWRQSTALNG

SEQ ID NO: 765 - protein, 255 aa, Phage F1245/05
VATIHSSEWLDQAKKVPVGQKRRVYHGAEMTPAMDVWNNEDSWSCYCHRCHAGGKVYKQFLQRVNPEQPVYRKYLNTKDLITIDELYSTDKLKYKRLMKLLHDKGMSMITIAALKPMYNKVDDRLVFRFKGVDIGRDCTGLHGAKWLVYHSDNPSGYVYLQGKNPYCTREPVILCEDLFSAQKVRYYTGWSSLFLMGTNFKDETAHFLMSRLPVIATDGDAAGWAARKVIRTRCEMFNIPVQSVDVPVGLDPKDM

SEQ ID NO: 766 - protein, 104 aa, Phage F1245/05
MGSKYNRIKFRVSRRSEWLLGIQHAENNGFPVGPDHEWKIERYRGGKALINVRLDYNDTGLNPESWYSTPIGTALWVDTLGDFKHAVNCFCHDGYLDVDNLKVV

SEQ ID NO: 767 - protein, 83 aa, Phage F1245/05
MAIIRIPIRTEAEANQFISIVKSQGLALPDLDVVHRLGLATARVGSDACVWTGIEQYIGTRHDFPHSDETVTVNQLYKRLQER

SEQ ID NO: 768 - protein, 255 aa, Phage F1245/05
MSDLNLLRVMMERKQFTGSFKSIPMDLYDPHTVTMLGWFKLYYKSYEDHERIDVDTLGSLIKLKTKPHEDKAKRDAQTALMNEMLRNLKQPLPLDIRATTLNALEERRLSAEAAMICRKYDEGEEIDVIFELNKLAIATKQRVELQTHAAWCDTDVWELIQADADDAGYVFDFLPEEFYTNIKGVNEGNNIGVAAPTDKGKTSFLVRVAVSFAKQRFKRMQNDDSMKFRPVLYLVNEGTAEVITPRVYQTALEIN

SEQ ID NO: 769 - protein, 255 aa, Phage F1245/05
MKFKRGDIVKAVMTGGCYSITSGQMYEVLDVRAGGNINIKPSRGPCNWSKSHRFELVRSKEDTVGVQPTMNIKLYDTVVRTTISHHLKIGEKYTVTTLYPQSNHIAVEGFPNMRFSAADFIVVPDLEDRPKSLGFDKVCAALKDGTPLQYFFNEKWVDVVRPDSISIGMINKSIWRYAINTIDYYGQEIPAPIKQYPSTGLVYGISLTKHEVYKCNVNKRLGQLHYKTAEDAHAVLTTILAPFGITPKALDFSLT

SEQ ID NO: 770 - protein, 255 aa, Phage F1245/05
MSLREQVRKYLDVTKSPVQLVKHMDEVLEKNIKYPLIAQHKYDGVYVLVAVTDGIPTLYSRTGKECFEGLYNTDFVMSLNGITDGIYIGELCNSKFSLEVFNGLVSTNRKKSWEDSESQDTIQLLEEHTFIMFHDYIFHNCLLEGHCKLPYWARYDLLRKRLRVAELLDYLVVSDEVKSREDADAYAQLIIDVGGEGAVFKHPAEEWVAGHKGYRTMKIVRDLVLDLLCVGVEYGKGKREGQIAKLKFSYKGSVF

SEQ ID NO: 771 - protein, 255 aa, Phage F1245/05
MSQINWLVLDFEVQNHDHYGSLASPHHPDNYLVATGWSEDGNSVQAEYHHSKDEQYCKRFADALSRAKNLVAHNLTFELHWLMKVYPNDLQAFINRGGRFFCTQYAEYILSNQIEMYPNLEDTARKYGGSPKVDAVKLLWEQGVLTADIDQALLMTYLAADGKNEWSNPEDPSFQGDVANTRRACFAQVAELRKRGMMGMFKERMDSLLFNAWATYNGLYVDLPTAQRNQAEQEKQIAQIKSDILGMLPNDLPDD

SEQ ID NO: 772 - protein, 255 aa, Phage F1245/05
MTFNALELVQGIDTSTLADMTDTTTGGGSKRGLLPAGFAFAVFSSYIEYGKQPQMFDGKKKDPALEFRLGFHIVGGVGTNLAGEDEDYVQDGFLPTISTWDTAQSRNEKSKAVKYFNAINIVPKGTHFIQKLGTMYLVEVKVTKNKKTGKDQNEFDFTSLQQARDQATRKAYTSYTNAAGIEVAMGELKPEDYKVFLWNRPTNVTIEQYQAMWDSIEIKGETEIKDAAGNVTGKRSKNFLQEKCQRALDFEGSSL

SEQ ID NO: 773 - protein, 115 aa, Phage F1245/05
MEDTNRATGRTTRMILKAVEYLIKHPKKTVRIVCYNNYGCVWMADYIKSIVSDRLWQRIELATYQHWQCSGIGKRDDYFFDHHCFYHEVYNLNNRLKEVKAQLERAEKDYRKYDA

SEQ ID NO: 774 - protein, 255 aa, Phage F1245/05
MMPNLSHFGLDAQTLSDQSTFKPSKGDSNILLYDGDGGCYQSAAGAAKQETAMRRFERDILENMFLAGCTKARVHLTPSGCFKNGRHLLLGAKKYQDNRSNKNKPQHLEYLRSPASVEYFKDHEDIEIILNYRVEADDALMMDHYRYHNGILVSPDKDLNISPFKSYKAELGKHLVLPEGDRYGWIDREFWLTPSQKPSSKMIGKGTKFFLAQLLMGDTADNVKGILKLNGKLCGESAAFDALNPITDEHEAVNF

SEQ ID NO: 775 - protein, 189 aa, Phage F1245/05
MNYNETLKRAEFAVQILNAAGYDAHIVGGALRVQALGGTTNDIDIAVITTFKEGELLNKDVNILLDRLGFNFKLQHQNSDYTDDSDLFIADWCSGDINLIAYNRSVTPTVRDLVNTFDLSINMFYKENGVLKNDVWLQGVCAVVLNPNRLGHNPKLNERIARFKQEYDHLDWSPVDKQLAIEEHMNAIL

SEQ ID NO: 776 - protein, 149 aa, Phage F1245/05
MPSSRPLQRISRQQLKGIMIALYQRQGNKCAICGKPIDFSITGHKANYAVDHNHETGEIRGTLHKSCNSAEGKVTNAAGRWGCKSTDYNDVIPWLESLINYLKTAHRNGTGMMYPDHKTPEQQKDAANLKRRKQYAAKKAAERMNASRK

SEQ ID NO: 777 - protein, 72 aa, Phage F1245/05
MQVGSKVVCVYAGDSTLIETHGTYEVLGFSSYDGPNSHVEIGLDGRLLGSYSPKRFMTVEEVTKQTQENLND

SEQ ID NO: 778 - protein, 255 aa, Phage F1245/05
MTKKHHALKGIKLDIMKLWWDGKSYQQIAEVVCKPYDTVYGIVQRYRDQQPPVQHTRKPTIFVIGDTQCKQGIDLAYLHYVGNYILEKRPDIIVHIGDHYDMASLSTYDKGQLSAEGRRVAEDIKAGDKGIEIIENYIARAKDYNPRKVVTLGNHEERIDRFVNHNPEFEGLIGTDKLAFANYGWEVYPFLTPANICGINFVHFVQNGMTGKPLGGTVMTRLKNVGESFVMGHQQVLDHCLRYLPLSGKAQIGVI

SEQ ID NO: 779 - protein, 58 aa, Phage F1245/05
MIIDGTKLRCINDKGQRIVKEGSLYTAWVRDGIGIDGRIFIKEHKRFALLITRFEVVE

SEQ ID NO: 780 - protein, 217 aa, Phage F1245/05
MKIGLIGLAGAGKDTSAVILQRVLAEQGLKFEIDRYAAPLKNAAKEVFGANFDERNVKEVDVFVDQDTMIEASFRCLRQLGFTDDEDEKASELFFEHIGFLEYLSPRLYQQLLGTEVVRAVRPSAWVDRIRRLNRNIIIPDARFENEVSDCNLLITRFQNIDKPKHPSEHLAWDLQFTGKVLPVDTININNEQGTTLELLEERIRSVVSLINFNEVV

SEQ ID NO: 781 - protein, 255 aa, Phage F1245/05
MSLYQRQLELEEKYSTMSLVAGQQQILDAFKQGRASDVGSGRILLAKAFAASLEDVKALLDKKITGIGGKYKKLLTLASPDVLVMAVLREVVNGCASPEPVTMQQFLRSVGRIIESESMLACMDKVSPEYTSRTVQYLDSAGTKSIQHRYRTFLKGAENINLHWDQWSSEERTGTAKLILGVIYESTGLFKWKTNPHSASDSMYYLVPSEELEKHFGEVQAAARAVVKYPPMLIPPMDWQGYNEGGYITDWFRMH

SEQ ID NO: 782 - protein, 87 aa, Phage F1245/05
MLLLIITILVVVLAVVIYKSEKETVRECFGILVEGVTLAKAKSDILKVAKVWFYTLKLTGELILVPFLTIALILFIIAGATYRAIIK

SEQ ID NO: 783 - protein, 64 aa, Phage F1245/05
MSVDKIPNFTEDQIYWLDSIFPENTQLTTNPNEVYVKLGQRQVIQRIKQDTARKRNAYNRANGG

SEQ ID NO: 784 - protein, 102 aa, Phage F1245/05
MGLGSFLKKSIKNSFRGGSLYKLSDKGDNMLRDVFGLNAFKDLAAGQDAQIRAMAEQNKLNTANEIQNVVQFEDDVNTGGSSDQRRRKNSAGAYARALNLNV

SEQ ID NO: 785 - protein, 255 aa, Phage F1245/05
MAGVPELHYSLSSLFHQYRDDGLLDRIETYALWTIPSVFPRDEHTFYNANKNRTIEYDYQSIGALLVNRLASKLARSLFPANTSFFRIDSDDPRLQQIFKARKLDSVIEYENAACARLFYNASYAQLVQALRLLIITGECLLYRVNDSMRVYSLKDYVVKRNNVGEVLDIVICEHKFMEELDPAMKVKVGVVPADTTVKLYTRVQRQLINGITSWKVTQEINGRDVGTNMVYRDKLCPYIPVVWNFVNGDSYGRG

SEQ ID NO: 786 - protein, 247 aa, Phage F1245/05
MSVENLPEGHPAREAAQPTPSVTPAVTPAPTTQPEPQVVYQNIPTYDTDSITDTAVNVFATSAGIEASRFDAALVNALNYGDEKLIDYTALTQGLKPDQAAQAKALAASVFKDRVAREQAHIQASTQKVYAVAGSAEAWKEASDAFNVSAPDHLKAIVRQMLDNGDVENAAKFVIETARGTGMVNNGTPPIQGGTGAVQQGLTQEQYYAELAKLERSAGNRSFESGQVGAEFQRLRNARILGRKQGL

SEQ ID NO: 787 - protein, 255 aa, Phage F1245/05
MAQGTIYQPNTTRDHWGGANSDVDQHLEDYTGIVDSRFQYTQIFGALSAQRSVADRSNTVRVDRFNTSKVKGRKAGEAIESQRVTSDKLNVIVECMMYIRNPIDWMDDWTAPDRLVEMSRNNGTEFAIAYDEAHIIRLQKARSWVAPDHLKPAFSDGMFVPATLKLTTAGVADLEANASALVVAHGKIVEALIKRRVPLTDMVTLVTPTVFTELVNHPKLINKDYVESNGDFADRRVVRVNGINVVECTTFPTAP

SEQ ID NO: 788 - protein, 82 aa, Phage F1245/05
MPQLCEAIISPALTGQALEVGDRAFEQGNTPAANDRVATLEGQVQALLALLQGQQAAGAPVAPVEVVAEEVKAPAKKATAEK

SEQ ID NO: 789 - protein, 121 aa, Phage F1245/05
MQLDPIDYKDFYRNAGLTELEETITDLINTLDLKVHSTEAIVHDTTVNTDCNVLVNGRHVVYTDGTGNAPPTAGLYLLEQTYITTEVDQEAIAQTATRYSTGLFYTRIRRSGVWTSWNKVG

SEQ ID NO: 790 - protein, 185 aa, Phage F1245/05
MKLLDAVNAALSYMGEHKITRVEGSNHPTVDSIVSAINRQRAALLSTGWWFNELHLTIPVETDGRIQTPARSLAIYGKSTRVSMEGEHLFNLDTGSVYFTEPVDVRIVRDIDFEDLPEYAAQYSLYVATAEVYSAELGVDNVVSVLDGLAKDAIANLRQENLRNRRYNPRRNAVRQSRYTWFRNR

SEQ ID NO: 791 - protein, 255 aa, Phage F1245/05
MAVREGTYKSLIQGVSQQIPQERSDGQLGSQWNMLSDPVTGLRRRAGVKLHARLTNLSSSSYIRMVDILGVYYFMCIDTSTGTMKIYTYDGVLKKTYTSEYLKAVSKASIRSTVSRSSCYVVNTDKVPQKVVGATSSTFNPAHGGYFSIRAGAFSKQYTITVKWGTVTKEFSIMSDGGSADQVTPAALAQRLWALVGTDPQVTAVFDVVNDGPTVALKAKAGQNPAQLSIETGDSSTYIMVSNASRVASRNDLLG

SEQ ID NO: 792 - protein, 226 aa, Phage F1245/05
MAGNFTAGVNTGMQGAQLGANFGPQGAVIGGIAGFALGFQTPDYEKIAREKYNSEVLKNFAKSLFDTRKVQNIENMRTAQALAAYQDNLRVQGSSYNAQYGAADMIGSSTTALKQAMDFQTQEAKRGVLINWETQVDNMNTSIDAMANQSMAGLRRTKGDTRQMDYAGLVKTGLDLYGQYRNTFNNPNTSTTQLGINKIPDNMSDFGSYGKSGSMGGFGGSGSLFG

SEQ ID NO: 793 - protein, 255 aa, Phage F1245/05
MPTMVQSPDLITPTISREQAIDRPVEQDGLSTFLQDVLPKVKEGYDQYQKENQDHYIALGMNDELNQITRDVSWLDSRNYEQGKEFQKVSSTQEAQKKAFTDTVTRMAREGKNADEIFDAGREYLTAYTNSVYNSQLSPDLKNALYEAGIKENTIYQKLITKTMSAVAEEREQFDAQTRVAGLYQTVSTGLDDQEINDALEAHVRKAYAAKIAVGVDPKEAMNAAQNEISATFKFWNGQIDPSSPNASEQVNNLR

SEQ ID NO: 794 - protein, 255 aa, Phage F1245/05
MASKYGVGKDIRTLEAVQPDIPENIGTGKGKKLIGTLAADSYKPLGRANTADLLVPEQQLQDAKAREEASLLETVTAAVAPTARDWGNAIYESYKFTPDVFYRPDADAQEFFNEYQITNQDEVAYINAANSYEDMEFRKRRILDRRDDQQKIADNPITGIVASMFDIDAAAMLVPAVGEVAGAAKFGRIAQRTANASIGAGGAYAINSALEDKSTRTQTERDLDSLTFGLVGFMSPIKYKPKELDAAITKEMADV

SEQ ID NO: 795 - protein, 255 aa, Phage F1245/05
MAINQKQSYSEYDVSTPQGDFAIGFEDYNEGEKDRINVTVDGDDAASKGYTVLRKNALTIAMTPFVPSGIVRLTRETNIDTTFYKFTAGAIFDAANVDANFTQVLHSQQEVRDRQSYVEGRVLPLVTGLEDALAKADEASKAAQEAAEAAAEAAQQTRSADKVIDASGLTQQDINNRLAITYPTAVGLVGKPNLKDADVVYVQSYSNIFDGGDGYYRVSADTTTVADGAYVIRINPNLIATMLNTTGSVDVARFG

SEQ ID NO: 796 - protein, 121 aa, Phage F1245/05
MNIVDQIYFGLVYVWSSLDKLIMGAAATAFVVALLRTRKRDGKASWIEATLCGIFATIALVGFSFIAPILVGILAGMGITINLPVDPSAGIAGIVAGFIGWYGTERTIEFVEDNLGGDKNG

SEQ ID NO: 797 - protein, 195 aa, Phage F1245/05
MGKFITLDEITSKAKEYGIETAALRAVMDVECKGHGFNSDGAPVILFERHKFYYGLQAINWITKSKEWYKLYPDICNPSWGGYGKESQQHERLRRASALNRDVALESASWGLGQVLGENWKDLGYKSLQDFINAMYKDEVSQLDAMCRFIKHNGLIKHIQSKSWAKFARAYNGPKYADNKYDTKLAAAYKKFGGI

SEQ ID NO: 798 - protein, 118 aa, Phage F1245/05
MAKRNSASVSLMNELHAAIASYMLARLKASIPDPNAPVEYDEETGEEIPAFFIPLAASELQVMVTFLNNNKITATPDVEHMAALANEFKGDLEAARKERAESITKVNENDAFMASLLS

SEQ ID NO: 799 - protein, 255 aa, Phage F1245/05
MGRVSRITEQTKRRLAMLLERCNRYKDNPVAIPAEEREELSMMFAATFKGFAEFAELGMKYLGFDLSEIQDDIAEYMQYGPAKKMVQAQRGQAKSTLAALYCIWRLIQNPTARILIVSGGERQASDVALLIIRIIMQWGILCWMRPDTSKGDRTSASAFDIHYSLKGIDKSASVSCVGITANLQGMRADFILADDIETQRNSMTQTEREKLLLLTKEFAAICITGEIMYLGTPQTKDSVYRSLPARGYDVRVWCG

SEQ ID NO: 800 - protein, 32 aa, Phage F1245/05
MSPEEIRRRLDTITERIANAVMIVNLIKEKSK

SEQ ID NO: 801 - protein, 52 aa, Phage F1245/05
MSTKREVVVQAVDNAVSVAKAVNANAEYKHKDKVTKGLELAGNVLQLLKLFK

SEQ ID NO: 802 - protein, 51 aa, Phage F1245/05
MDGFESTVKVGVKHTQYEELRDLKQRGETFDDVIRRLLDAHKSLKSIGLLD

SEQ ID NO: 803 - protein, 43 aa, Phage F1245/05
LYSSLSSIYSITLIVISIYIYIVISYCSLFMFFILYSYTCSIQ

SEQ ID NO: 804 - protein, 72 aa, Phage F1245/05
MKTLTHHIAVQCTCGATGQTGDFLVDIEHFKLTGELIALDGMVFRSLTALYAYANTYGLPTKRLNTPIVYQS

SEQ ID NO: 805 - protein, 172 aa, Phage F1245/05
MKLLLNVQEINKAIESIANRGKKLDHDIHVAGVSVLKHVAEHGDTTLLDKLVNAMPKGARKGAFCEWALAFGNVRMLDRSNEADKLAIEQGRLFAKDKTKEYNEVEAMAKAWYDFKPEPDLLTTFDAAQAVKSLLKKYKTALDNGAEIKGGDVAMQQLKSFMQTLNTMDEQV

SEQ ID NO: 806 - protein, 67 aa, Phage F1245/05
MKVKVRNKFAAATSINYKGHYVVRNGNGTLTLGAEHITEEQAAVLNLQEFSKVREWLGPSYSVEIIV

SEQ ID NO: 807 - protein, 164 aa, Phage F1245/05
MVTDMTDTKDQGYDLGDENLLSVAKLAMRRGEYLLSAWDQFAAMDIVDGLNRIPSADGLIVYLKHGLCTNIRFEISPMANHRLRGSQALDSLLELAYPQWDGYSGNSTYPVDGYYEYEGYTEDGEHDAGMYHEPNLFRNPKRKELLTWLVTSFLPEYIKHWSAE

SEQ ID NO: 808 - protein, 169 aa, Phage F1245/05
MLIVPKVNPNVTVTLNIGLGESIAWGKYKKENAEHGPVQSLVDILDTPHRVARILERIQGMAYNPNQHHHGPHVAHNSYGIDYGHHVLPNVNWRTVQVGNEMTLVVKFEAVARDIIGQVFYLAEELKQDCIAVWIHNDTNGGIGQLIGRYNYVWSGGYFNPEYFVHLEV

SEQ ID NO: 809 - protein, 34 aa, Phage F1245/05
MFKEYNYCGQCRVNYINCHCPTHYPERNKDDHHL

SEQ ID NO: 810 - protein, 27 aa, Phage F1245/05
MKKLGLIVVYTAAYAAISLVQWLQDDK

SEQ ID NO: 811 - protein, 189 aa, Phage F1245/05
MFVLKSTHQKALDEIKSLRAQLDAAAKTKRELQERIDSVRKVRDTVIKYNACLTALCQYLPEGVYRIDYGAERRSCSTLRKTSVVSYSTSVTVDHKAAKMTNRNYTIQHEPLARTCKQAELTARLVALEVQYNIINRDIVVLDQTIKLAQALYDVPTVCHSVTKRSVLSKQRKRIKHELDLVKVELNNL

SEQ ID NO: 812 - protein, 255 aa, Phage F1245/05
MKYYDNSHPELQGYKQFIPENPNQWFDLMSANRAVFIREDKRVDADVWDMIVQHLTGVSYKPHRYGEGKRHYTEFQLLQGHRKLGEGYCSRVYTHPTNPERVVKFFERYHEDVCCYEYLRMCVQGKLPVFDWLPEVHSLACIKVLIREDDKVRIITYGVAVFPRYDPIESDYEKQNRFVQDGINAEFKKYVHPYLPHARIDLHWGNIMWDRRLNQYVATDPVINSAPVETHVQTIDWFPKEISAKYSGATACSRP

SEQ ID NO: 813 - protein, 101 aa, Phage F1245/05
MVVYGNVIFERDLAQTMYKRMSSRLADGVRRCCMVDEHTLYFESEVSDRLSRKKFNNILTGQRIAPYSEIKYPKVGEHTLMSDQAIAEAKAILSSETRTRS

SEQ ID NO: 814 - protein, 67 aa, Phage F1245/05
VKHVHVVEVIMWILIMSIVVGSYRGVSATTQEFTSKERCMVAAQMALDKKMGGGDNSNRLTAICVPK

SEQ ID NO: 815 - protein, 176 aa, Phage F1245/05
MSLAKQFNAAGIRGSKPKSDKGWTFKAQKAYVRNRFENVERVIAPVYNHKVEQVARAIIVETPLASLNVVAQGSSLHYDYSPDTLVRIGKLTRKGATFSADSNSALAILGLNGAAVLYWLGGLRINIDEQQYEVITNDGEYIYATVGIILQLARDCVFNRDAVLANFQGAKRVRAK

SEQ ID NO: 816 - protein, 40 aa, Phage F1245/05
VSAPNNIFHKGMRVIVTKADRDDVRLGLHGDTIATVVGVH

1. An isolated bacteriophage having a genome which comprises the nucleic acid sequence of SEQ ID NO:1, SEQ ID NO:2, SEQ ID NO:3, SEQ ID NO:4, SEQ ID NO:5, SEQ ID NO:6, SEQ ID NO:7, or SEQ ID NO:760.

2. A pharmaceutical composition comprising the bacteriophage of claim 1 and a pharmaceutically acceptable carrier.

3. The pharmaceutical composition of claim 2, comprising at least one of:
(i) a bacteriophage having a genome which comprises the nucleic acid sequence of SEQ ID NO:1 or SEQ ID NO:2 further comprising one or more additional bacteriophages effective against Enterococcus faecalis or Enterococcus faecium and/or one or more additional bacteriophages effective against bacteria other than Enterococcus faecalis or Enterococcus faecium;
(ii) a bacteriophage having a genome which comprises the nucleic acid sequence of SEQ ID NO:3 further comprising one or more additional bacteriophages effective against Pseudomonas aeruginosa and/or one or more additional bacteriophages effective against bacteria other than Pseudomonas aeruginosa;
(iii) a bacteriophage having a genome which comprises the nucleic acid sequence of SEQ ID NO:4, SEQ ID NO:5, SEQ ID NO:6 or SEQ ID NO:7 further comprising one or more additional bacteriophages effective against Staphylococcus aureus and/or one or more additional bacteriophages effective against bacteria other than Staphylococcus aureus; and
(iv) a bacteriophage having a genome which comprises the nucleic acid sequence of SEQ ID NO:760 further comprising one or more additional bacteriophages effective against Acinetobacter baumannii and/or one or more additional bacteriophazes effective against bacteria other than Acinetobacter baumannii.

4-10. (canceled)

11. An isolated protein from bacteriophage F1245/05, F168/08, F170/08, F197/08, F86/06, F87s/06, F770/05, or F91a/06, or a fragment, variant or derivative thereof having antibacterial or antimicrobial activity against one or more of Acinetobacter baumanii, Enterococcus faecalis, Enterococcus faecium and Staphylococcus aureus or having a biological activity associated with the bacteriophage from which it was isolated; wherein said protein is a lysin protein, a tail tape measure protein, or a tail protein.

12. The isolated protein of claim 11, wherein said protein is a lysin protein having the amino acid sequence of SEQ ID NO:68, SEQ ID NO:184, SEQ ID NO:202, SEQ ID NO:203, SEQ ID NO:446, SEQ ID NO:447, SEQ ID NO:448, SEQ ID NO:575, SEQ ID NO:641, SEQ ID NO:712, SEQ ID NO: 797, or a fragment, variant or derivative thereof, which fragment, variant or derivative has antibacterial or antimicrobial activity against one or more of Enterococcus faecalis, Enterococcus faecium, Staphylococcus aureus and Acinetobacter baumanii; or wherein said protein is a tail tape measure protein or tail protein having the amino acid sequence of SEQ ID NO:61, SEQ ID NO:63, SEQ ID NO:204, SEQ ID NO:214, SEQ ID NO:435, SEQ ID NO:438, SEQ ID NO:440, SEQ ID NO:525, SEQ ID NO:526, SEQ ID NO:527, SEQ ID NO:528, SEQ ID NO:529, SEQ ID NO:530, SEQ ID NO:531. SEQ ID NO:532, SEQ ID NO:533, SEQ ID NO:534, SEQ ID NO:535, SEQ ID NO:536. SEQ ID NO:537, SEQ ID NO:538, SEQ ID NO:539, SEQ ID NO:567, SEQ ID NO:568. SEQ ID NO:632. SEQ ID NO:633, SEQ ID NO:700. SEQ ID NO:701, SEQ ID NO:702. SEQ ID NO:703, SEQ ID NO:704, SEQ ID NO:795, or a fragment, variant or derivative thereof, which fragment, variant or derivative has a biological activity associated with the bacteriophage from which it was isolated or derived.

13-14. (canceled)

15. The fragment of claim 11, wherein said fragment is a CHAP domain isolated from a polypeptide having the amino acid sequence of SEQ ID NO:68, SEQ ID NO:184, SEQ ID NO:202, SEQ ID NO:203, SEQ ID NO:446, SEQ ID NO:447, SEQ ID NO:448, SEQ ID NO:575, SEQ ID NO:641 or SEQ ID NO:712.

16. The fragment of claim 15, wherein said fragment has the amino acid sequence of SEQ ID NO:755, SEQ ID NO:756, SEQ ID NO:757, SEQ ID NO:758 or SEQ ID NO:759.

17-20. (canceled)

21. A pharmaceutical composition comprising the isolated protein of claim 11 and a pharmaceutically acceptable carrier.

22. The pharmaceutical composition of claim 21, comprising at least one of:
(i) an isolated protein having the amino acid sequence of SEQ ID NO:61, SEQ ID NO:63, SEQ ID NO:68, SEQ ID NO:184, SEQ ID NO:202, SEQ ID NO:203, SEQ ID NO:204 or SEQ ID NO:214, or a fragment, variant or derivative thereof having antibacterial or antimicrobial activity against Enterococcus faecalis or Enterococcus faecium, further comprising one or more bacteriophages or additional proteins effective against Enterococcus faecalis or Enterococcus faecium and/or effective against bacteria other than Enterococcus faecalis or Enterococcus faecium;
(ii) an isolated protein having the amino acid sequence of SEQ ID NO:435 or SEQ ID NO:438, or a fragment, variant or derivative thereof having antibacterial or antimicrobial activity against Pseudomonas aeruginosa, further comprising one or more bacteriophages or additional proteins effective against Pseudomonas aeruginosa and/or effective against bacteria other than Pseudomonas aeruginosa;
(iii) an isolated protein having the amino acid sequence of SEQ ID NO:440, SEQ ID NO:525, SEQ ID NO:526, SEQ ID NO:527, SEQ ID NO:528, SEQ ID NO:529, SEQ ID NO:530, SEQ ID NO:531, SEQ ID NO:532, SEQ 1D NO:533, SEQ ID NO:534, SEQ ID NO:535, SEQ ID NO:536, SEQ ID NO:537, SEQ ID NO:538, SEQ ID NO:539, SEQ ID NO:567, SEQ ID NO:568, SEQ ID NO:632, SEQ ID NO:633, SEQ ID NO:700, SEQ ID NO:701, SEQ ID NO:702, SEQ ID NO:703, SEQ ID NO:704 or a fragment, variant or derivative thereof having antibacterial or antimicrobial activity against Staphylococcus aureus, further comprising one or more bacteriophages or additional proteins effective against Staphylococcus aureus and/or against bacteria other than Staphylococcus aureus; and
(iv) an isolated protein having the amino acid sequence of SEQ ID NOS:761-816. or a fragment, variant or derivative thereof having antibacterial or antimicrobial activity against Acinetobacter baumannii, further comprising one or more bacteriophages or additional proteins effective against Acinetobacter baumannii and/or effective against bacteria other than Acinetobacter baumannii.

23-29. (canceled)

30. An isolated nucleic acid comprising a nucleotide sequence encoding the protein of claim 11.

31. A method of treating or preventing a bacterial infection in a subject in need thereof comprising administering to said subject a therapeutically amount of the pharmaceutical composition of claim 2; wherein said bacterial infection is an infection by one or more of Acinetobacter baumanni, Enterococcus faecalis, Enterococcus faecium, Pseudomonas aeruginosa and Staphylococcus aureus or by a bacterium other than Acinetobacter baumanni, Enterococcus faecalis, Enterococcus faecium, Pseudomonas aeruginosa and Staphylococcus aureus.

32-33. (canceled)

34. The method of claim 31, wherein the infection is a nosocomial infection, an infection of the skin, and/or an infection associated with diabetic foot ulcer, and/or wherein the subject is a mammal, a human, and/or wherein the composition is administered topically.

35-39. (canceled)

40. A method for diagnosing the causative agent of a bacterial infection comprising
(i) culturing a tissue sample from a patient;
(ii) contacting the culture of step_(i) with the bacteriophage of claim 1, or the protein of claim 11;
(iii) monitoring for evidence of growth or lysis of the culture
wherein evidence of lysis of the culture indicatives that the culture comprises a species or strain of bacteria that is known to be susceptible to the bacteriophage or polypeptide used in step and/or
wherein said tissue sample is a sample of blood, fluid, tissue biopsy, or swab collected from said patient.

41. (canceled)

42. A method for reducing or inhibiting the colonization or growth of bacteria on a surface comprising contacting said surface with the bacteriophage of claim 1, or the protein of claim 11.

43. The method of claim 42, wherein said surface is the skin or a mucus membrane of a mammal, the skin or a mucus membrane of a human, the surface of a hospital apparatus or a piece of hospital equipment, or the surface of a surgical apparatus or piece of surgical equipment.

44-46. (canceled)
